United States Patent Application Publication US 2009/0214546 A1 - sequence listing, part 3

SEQ ID NO: 128 - DNA, 811284 bp, Homo Sapiens
  misc_feature (266219)..(267104): n is a, c, g, or t
atgtatttacccatatctcttttgtctacaggtggctgttcctttgatgagcactacagcaactgtggttatagtgtggctctagggaccaatgggttcacctgggagcagattaacacatgggagaaaccaatgctggaccaggcagtgcccacaggtatgtgatccatcatgtttggggctgtaatggggatggctagtttttaccgtgaatcatggggggaagaacttacttacacattgagctctctgagatggcaatcgatagctctgtaggtagtgagttccccacactcagaggtggtcaaaccaaggctgaatgaattcttcaggatttgatactagtcacatgtcacctggattcagcatttcttttagcgtcgagattctaagctttagctacaagtaggtatcactgggttttgcttgggagcctgatgatagtggcgtgtcagggaaagagcttctgaagaatttacggtcgctgcttttcttccaggccacatggacataggttgtatatatttagggaaacttcaacagtacagactattataaggttatattaattatattattatattattgttatatattatcatattattatctattattgtgtgttatattatttacatatattttatatacttagggagacttctacagtcagattattataaggttatatattatattatacattatatatgttacatagtatatatattatataatttatatatatatttagggatacttccacagatttttataaggtcatattattatataatatattattattatatattattatattattattatatattgtattataaggtaaacatcctgacattctaaataccaaccttttgtccttaaccagcagcgctgaaggcctagtgtgaattcttgatggatacctgcatggggcaggcctgtgaggtacacctgatatgtttcaggggaagtacccaaaggaggtcttctcagagagaacacttagactctaaatgtggggtatacctgcgtaaggtgcatcttgaagaggcttacctggtgatagaagccaggaagagttgtgactctgagaaagtgaagctcacttttctgaataatcacatgtccctgctgcagttgtaaagacaactgcttgttggagaagggaggccattttctacagtttctgcttgaccaaaggctccctcactttaacccacacctgtcttggttttcaccaatcccccaggtgctctttctcagtctcccctgtcagtgcactctggccatggagtattaagagttcttcaggcttactgggtgttctttctgtggttggcctcaaccactcccatggcctcagatactgcctctgtgctggtgattctgacatttatgcctccagcctagatgtctcaggaattttacacctacacaacccactgcccagctgccatgtcatcttggctacctctggagaacggggttttccaggatgctactaaagtgggagcaaagaagatgctcagagatgcccaggtgagggtgtggcctcattcactttgagtctggctccaaaacaggaggcactggatggttatggatagctcctattaagggcattaattgtataaatttctcaaaagtgttgatacaagccttaggtgtaataaagttaggctgtggtacaaaattgagcatttcagatctggtgggaccttactttgaatgagcaaagtcatcaacaggtgtgcatgcctattagcaaggcagtgtggaacaacctctgtctgttgcccaatcatgctgactttaaaaagtactgcctggtttacatgatagaatcacccatcccattagggaccccaagaatccaagacacctctgcttaaacatagcacatctgctctactcttcatggccctccttgatagtggcccaataaatctggatcttatagtgtgtatacgtgtgtgtatgcgtgtgtgtgtgtgtatgggggtgtatgggtgtggtgtgtgtgcatgcctgtgtactggtatgtgtgtgtgtgtgtgtgtatgggggtgtattggtgtatgtgtgtatgcatgtctatgggggtgtgtgtctatgtgtatgggggtgtgtgtgtgtgcatatgggggtgtaagggttgtgtgtgtatgggtgtgcgtttatggagggtgtgtgtgcatgtgtatgggtgtatgtgtgagagtgtatgggggtgtatgggtgtgtgtgtatgggggtgtatgggaggtgtgtgtgtgtgtccgtgtgtttgtatgggtgtgtgtatatggcggtgtgtgcatatgcatgtgtatgggtgtgtgtgtattcacatatgctctttctgctcatctttagtccacttaaagccctgtagcatgttgtaggctctccaagctcaacatctccaaaactgaactcttgatttacccatttccccttccctgtctactcactttccactgttcctcgtctccagaaagctcacttcaccctactggtactgattcagaaaccggggggccatgtttctcttttttctctctcttacccacttttccaatcaatcactttgttctgccattttacttcctaagtatagtttgggtctgcccaagcctctccatctctgccaccactgccctggtgaacacaaccattgtctgtttcctgggtaagtggaaaactttctaacagactccttgacttaactctttggactttaatccattctccaaacagatgtcgaagagattattctagaatataagcatgttcatgttacttcttttcttccttgtctctacccagcttctgtcttaaggctttctgaggcttctcattgctccaggaaagaccaaagccctgttgtggtctccaaagctctgagtgctgatcctccctaaacctccaaatcatcatcatgctccacatcccactctgctcactttacactggcttctgccaattgccagaatgttctgactctctcctgcctcgggaactcacatgagattggcatcctccacggagcctttcccctacctactgtcttgtgcgtcctcttcatatctcagtctgggtcagcattctttgtaatggttcccgttgcaccttgcacttgtccttagtagcacgcatcacagcaggtgttattcatccagtgcatggtttactcccagatgagaagttctatgtgaatggggaccatgagaatcttgttcataactttatcttcagtgcctaatgcagtacatcagacatcctatgtactaaattagcaatttgttggatggatgtgtggatgggcaaatagtctttattaagtgtttttattaatacaggaatgaatgaaaaaagattaaaggcctttgggtgctttactaactgatcatgtattttcctctttgctactatccttcccattttacggatcagaaaaccaagttctaagaagctgagtaaaagtgtgtctttttactcatgctactctctctccccaaagacatggcttttgcttctaatattaattttctcagcccctcattatggcagggtgtcatttcataaatattggatcatgctaatacaatcttctgggcttttctaaatagaggcatttgataatgatcactgaaattattctgtcatgatgcgcctgtggatttcagcagctctgtgtgcctcttaggcagagaggcatgaaagcgaatttggattaggcaaaactgtttgttcttcttatgggcataggctgaaatcttgcttttctttctgtaaagccagcagttctcctcatcttggaagtcaagtttgagtctgtttattcagatgttccacagctttttgcccatcccctttgtatgacgagctccctgctatacttggtctgggtaactcattccatgtcattttgggacttaatcctgctgatggcctcccctggcacataggatgaaatctgaaatccttgtcatggcctataagatcctgcatgatccaatgtcttctttgggccccttttcttctcctctctcatacctggtgtgttttagttcctgagatgtgtcagattctttcttggcacgggtcctttgcacatattgttccttgttccttctcaccagaatttgttttctcaattcttcactttgttgatttctctttcgttctttggttgtctctctctctctttttttttttttttttttttttttgagacagagtgtcgctctgttgcccaggctggagtgctgtggcgttatctcagctcactgcagcctccacctcccaggttcaagtgattctcatgcctcagactcccaagtagctgagactacaggcgcacatcgccatgcctggctaacttttgtatttttagtagagatggagttttgccacgttgaccaggctggtctcgacctcctgacctcagttgatccttccgcctcggcctcccaaagtgctgggattacaggcatgagccactgcatctggcgctttgctgatttcttcatgtctcagctcacaggactcctcaaggcaatcttcccttatccgtctgtctaaagatggacttcctccttattctcactcataacatcctgttctttgctttcaaaatcgttatcatagacatgtttgcaagtcagtgtattccaatcttacacaacagctgagtgaccctagggtctcaactcccagtttccacatctttatcttggggaccagtgtgagagttaaatggaggatgtctgcatgagtgtgaactgtctgcctggagtaggggttagtcaatgctggtttttctaaatgttttctggttcttgcaatctctggggctggaagtccaagtccacctgagaccttgcccccacttctagctcactgatgctgctttacaaaggcgagctgctcagcaggtgttctactgtgggtcctgacaggccagagaggcttttcaagtccaggatgcattgctgcatcgagggcttagacatttcctccaccccacctctgtgaattgaatgttacacacacctactgttatttgccattgaaagtaatggcaaaaaccacaactacttttgtgtcaacctaaatacagacttttcctcatctctgtccatgggagaagctcttgcactagcattccaggcttcagacctggtttcactaccttatcgttattgaggctgtcacagaggagcaggggttagtacactcactcacaaaccctctctctagctgtctatcctgcctatggaactaactacagctaccaccagttcctagccctgccttccccatctttggcatgggtttccacaagtcatccctgaggtacagccctgaattacagcccagggcccagcaggagggcatcctgggggctgaaggaagatgtgagtgctggaggtatccttcggaaagggctgaagccagaggtagtggggcttgggtggcttgcttctatatcctttgaatacttgtaggacattcttttaaacataaggtatggattagggttgaatatcaggttgcaaaatcaggtacataagaaatactcacttatttctcttctttacataaacctgaatctgaccctcagtccccagggagctgagactatattttaggcactgttggagctccctcttccctagggttctatgagtttcctggggtttcagcagactgttgtgattttctctgggaatcccactgctgcattccctttaggtctagtgattctgctgctgctttctcaggctaggagccattgtcacagcccagccagcccaggtgcaccacccacaaacccccccgggcctgcccctcctcaggtactgccacggaggagtgtggcaccagcagatccatacctcccaccttcgtaaaatgggagaacctctctcctcaccatcttagccttcaaaagcacacccttcttggcccagtccttccagaccccagcattctctcttaagtaagtttagagttagaaaaaacaaaggaggaaggaaggaagccttgatttcaagcagcttcttctatttttcctacacacatttctagagcagaaaaatacaaaaagcttagtgagtttccagattggaaggaggaggagttgggagaacacacacacaggtgacacacatgcacatgcacacacacacacgcgcacacacacacacacacacacacatttcacccaactagcatgtcatggaagcagcaccgtctccagggtggtcctggcctgttccttcacaccatggggcctttccctgtgggttcctgccttgctctaactgctcatgtgtctaaagggagggttgaggtctgtttgggttgaatggtgtctcctaaaaagataagttgaagtcctaacccctgatatctgtaaatgtcacacttaattgaaaataagtatttatagaaatgatcaaattaggatgaggtcaggctggtcatattgggttctaacccaatacgactcgtggaggcaaagatacatacacacatagggaaggaggccacatgcagatggcagtggagattggggcaatgcagccataaggcaaggaatgctgaggattgtcaacagaaaccagaagtcaggcaaggcaagttgacgggttcttctctagagcttttggagacaacgtggccctgccaataccctgattttggacttctagcttccagaactgtgagacaataggtttctgttgtcttaagccacccagctcatggtaatttttaatagcagttctaggaaactaaaaccaggtcaattacacatcagtaccctgaccccatcacctacccaggttaccttttccacacgagctctgtaagtattggaagctttgctttcttctgtttttttgttttgttttgtttttttgagatggagtctcgctcggtcgccagggctggagtgctgtagcacgatctcggctcactgcaagctccgcctcccagattcacgccattctcctgcctcagcctctcgagtagctgggactacaggcatccaccaccaggcccagctaatttttctgtatttttagtagagacggggtttcaccatgttagccaggatggtctcaatctcctgacctcatgatccgcccacctcggcctcccaaagtgctgggattacaggtgtcagccaccacgcccggccagcgttgctttcttctaagggagctggcatttactacttgtccactctaactaagaagtgggttaggcatcatcctgtacaacattttgtctaatgtcccaccatcccatgagttcgagatattgtcacttgtttttgagaaaacagagtcccagagaagtgaagcaactggtccaaggtcatgtgagttttatgtggctgaggagtcaggcttgatgtccaggctagagaaatatatattgcagacatggtactgttgtcaactaagcatctttaaaaattgtttctacttgcagtcatgatttatgatggcaaaaataatgtgtattcattgttgagaaaatgctcaatagagatagctataaagaatgaaatgaaagtcatatgttcacacaaacttgcataaatatgtattttgctatttaatacttttttctttagcattttcccatgtcattaaatgttccataaaaccatgttttctaaaggtttcatagtttcccattgcaatgactgttccacgatttatttcatcaccccatattgttgcatatttaagtcctttccagttactcctgaatcatgttgcggtgagtattcttgtacatacatctctgtgctcatctccaatagaagttatcgaatttgttttcatatgtatatatttctgtattcccttatatacccaaaacagaatggttgtgtattatctttgacatctggagaaggaatatcatccacatggcaaacatgtagtcctggacatttgcccatgacttgatggttgggaaaatgctttgcaaattctgaagcactaaacacaagccaggcactgtcgatggtcccctgattgcaccttgttctagctcttagcttaggtactccctgggctttagcaagaatagtgttggaaatattgtcgaatagaatggtccaagcactagtcaatccaggtggatgctagctgtaaaaagctgtgtgggctccctcatgtttattggatgaactgcaagcttgttcacgggccataaacagagctagcttcggttcttgtaggcaggaacaacattgtatttatatttgtaaccgcaatgctggggcttagtaggtagcggcaaatgtttgttagatgatttgctcttattaataattgaactttctcatgatgcgaccccagcatgtatcttgagcctcagtgccccctcctgcccttttctctttcatttccccttctgtgtaatcacacgagagcagcctttgtgttattgttttgggagtccagtctccaaccctgtttcttgatttggggtatctctcattgtgttgagtctcagtggattgtgtagctcgctgagaggtgaagatgccagctgctcatcatttcctggcagcctgggtgtggctgaataggtaacctggatgcagcaggtggaccctgctgcccaggacttttcatctaggaaggatgggccagcagccagaggctggagaattggggtgtgcagtagtaggggtggtgtctggccatggtgtttgtgctacaaagttgctggacttcttgcttgttgatctcccagaactcccttttttttctgcttatttttcaggcctgatccttcagctttctgttcattatgagcttctcaatattccagaaacttcgtattttttaaaagatagtcatagttgatatctcttgtttcaaccacaaaccctacaggtcacactgtcgtgcctttgtacttgctgatccctaaggctaagagcacagctccacttttccttcctcctaaatcaaaccccggcacaaatgtcacctcctccaggaggccctccctgactcccctcacagcgcttacctctctactatgcttctgtagctgagtttatcacatgttgtctctgattccctactaggcctgtgagtggctgcagggtatggactgcctctcgttgctgaattccttgtatcctgcatggggcctggaataaggaaggcggttatttaaaaataactgaattattgttaaagttattcgtgttgggaaagttgggagaaagtggtttcaggaggaccctaaaggggctgccacttgctttggcattttcgtggcacctggggcatctgtagctttcatgtcttgagcccgactctgagcttgacgaggctttggtcaggatgggccacttggtcccaggtcctgattggtctgggttcttctgctctgaagttggtcccaggatccttcgggcaaataaagagacactggggatgatcccttccttcgctctggggcctggcacactctcatgaatgtgtggcactgcttgtgacacatgtaactggctcctcttggaaagatgtaatctattctcagattgacctactcttcctttaatgtgaggcttacaataaaatcatatggaagtatgggcctttaagtgtccttaatcacacctgatattattattgattggtttaaagttgtaagttcttatgttcccatttagcaattgttgagtcagtacatttttttctttcctctttaatgacaaaatattatatatttattcttaaaaaatgctgagtttgaacatataagttacctctctccaccctgattacagttagcctaaatatcaccattaacatattgatgtgttttgagagagaaagggagagagtgaaggaggatggagagagggaaggaggaagacagagagtatctgtatgtggtaatagtaatagagacgtactacctatgtagtgcttactatgtgtcaggtactatcctaagtacttgaaatatagtaacttatttaatctttgcaacagtcctctgatgtagatgctgttatctgcattttacagatcaggaaacctaggcacagaaaacttgaatgacttgcccaggtcatcgttagcatatggtggaggcaggacgtgcccttggaaagggtccaggctgtgctctggacagctgcactgtggccacttaggagtgtagacagtgaatagaatcatagctcccaaactcttctgtcatccatctctttttatgccactgtattcagagttagttttcaccttccaaggctacatgatattctcctgggtgaatgaaccatggtttattcaactaacacctaagagatagaggtgggagaagaaagaaatgccagaatgccttctgtgtgcccaaataaaagacaagatctttgtctccaaacagctctgagaaaagttcttacaaaacatctcatattataagatggtttttcgtgtacttggagctacaaaattaattgtagaaactacattagcctgcagtgaccccaatcagtgctagtttgggatgtttacagggatcacagaattgatagaaaaggcaaggaaattgaacgcaggtttagtaattattccggaggatatgagcaagtaatgacgagtgttggtgatggttatgaacaagtttcctaacaatgtcctaacaatggctttgaaaagcaacatgatgtccttttggtgatcagaatatacagctgccagataaatgggaaaacctgtctgtgctaatatccacatagatgcttgccttgacactcagttttctgtgacatcatacctagattcaaaaagtattatattccaaatggtgtaatgggaagtgaaagtgatggagactggcatcgttcaactaaaaaagtgcttcttctgatgacaaacactgctgcatttgacgagttagaataaaggggttgtctgggaggcagaggttgcagtgagctgagactgcgccattgccctccagcctgagcaacgaaagcaaaacttcatctcaaaaaagaaaggaagaaagaaagaaagaataaagaggttctaaagtctatgtgaatggataataaaccactatgtcttttaacctaacatgtgtataccacttcctggacagtgttctaagggctttacatgtttttacatcgtttaatacttcaacaacactgtgagctggatgttattatcacccttattttaaagaggaggaaactgaggcccagaatgtcaactctctcaaaagtgagttacagtaaatggaggagctgagatttgaattcaggccgtctggatccagaatctgtgccctgaaccactctctatttttcaattaatattttatgaaacgtgattttaaaatgtatgtgtaattaaattgtatattagataccataagtggacttttgcctaattcaatcatctgtacacttaaaattgtatttattaaagttgcccgaaaactttttttttgaggagaggatgtcttctcactggaaaaatggaagaaatgctttacttttaatggagggttgatcctgtcagtttgttgaattgtctaagtctgtcagtgtctctgtaaatgcagatacagtgaacctgcatgttgttcggagtaaattctttgaaaaggaagcatcacaaaaacagtcgtgtgtcagcgacacatttaacaggaccacagagatgacgttcttcaagattcctctgtttcctgctgcttcaactttagccactcccagggcagccggagaggaagacgttgctgagaatcatcctgatcatggtgatgctggctggatgctgatgctaggcgatgtcttcgtggaccattcaaccgattgggctgctgcaggggctagagctcctgcaagtgaacctttcatttttaaatgtgtgatctgtcttttccttagtaaagaaacaggttttcattatgctttggctattatagtaatttgaattacaaatatgcattctaagatatttggtaagaaaaggaaatagtttagtataaatatagtcttttttccccagtttagtaaaaacaagatggctgagatgtctctaaaaaataaagtccaacaatctggaaaatccagtaatccattgaggtcccatttgccatatctaatctggtggtcattagccgcacatggctacggagtactggaaatgtggctagtcctgtaagtgtaaactacacaccagatttcaaaaacttagtatgaaaaaatcatgtaaaaacatcttattaataatgtttatgttgattacatgttgaaatgattatattttagatgtattgggttagataaattattaaaagtaacccatttcttttttacctttttaaatgtgcctattagaaaatttagaattgcatacgtggctcacattgtgtttctattggtcaatactctcctagattattagatttttatgacgtcacttgtattcccaccaacagggatatctctctttgagaatagtaatagctagcatttataaagcactcattctgtgccaggtgctttaaagccttgtttcctttatggttcacaaaaccctatgcagtgtaggtaacatgtgttcccactttatagatggaaaattgaggcacgaagagattaagcaacttgcccttcatcatagaggttggaagtgctgggaaggggatttgaaccaaagcagctcaagtcagtggcacccactgatgactcccaggcatccaccttttagcacatggacataacacttctgtctctgccttgctctgttgacttgaacctctggacctcagttttcctacccaggattgggtggaaacatgtgattttaaatatgtagaacatattaacaacagagctacctcaggcccctctagctctgttcttcctgtggttattattgtggttctgtgtgggctgcaggcacatggtggaattgggtaggcattatctctactgccaggcctttggttagcatggccttctgcctagtggctaaggaagcatccctgggaactcatcccagatctgtcactaacctcagactttgagctgcctttctctgggcttcctacacccacttctgtgaaatggatctaaaaataaggagtcctggattctgtcctagctctgccattaacttgctctgtgaccttgggccacacatcatccctccctggaccttattgaccattgtaatatcagaagtcagtttcttctgactctagcattctttgacttgtaatttatgaatcaagaagaaggcatttctaaacataggaatttagtgatacatttataaaacaaaacattggtgaagactcctgtggtcctaacccctccattcgtctgtctgtcaagcagggcaactgcttctgcttctttgcagaggaatttgtcttcatgagtatatggaggtagggcacctgacgtacaatctatccctgagagcccagaccttcacagaaagataaatctcccagttgagcttaaggcacgtactctgttctcacgcatccttgcagagctgcagtgatctatcacatgccccattaatttcacaggtacaactccagaatttatttccccacaactactaatcagtgagacatttggtaattgagagaaattacccttttctaaaaagacctcctgttttccctcttcatctacctagttttgacactgtgctctgtgctgacacgatcatactttatgtttggaaagcaacagatatttgagcaaactgtttttaaaactttcctcaaatctgccaatatcttttaaaattgcttcctttcctaggtgttgtgtttccttattaagaaacccaaattgcactttctcaggattcaaagccttgtagtcaatgaaacaacttgtgaaagctatgaacaagcaagaatatgttatgtcttttaagaactctgagagtgtctaaggttaaaataagacctatagcttccaagatccttctaaatcatagctgcaaacatatataagcatgatgtgtccatcagtttggattcaggtaggaaaacggaaaccattctaggtatttcaatcaggaaggggtttaatacagggtattagaggtttataaaacctttgaagctctcacatacatggtcaaataatcttcactaagggtaccaagactacacaatggagagagaataatttcttcaacaaatggcatttagtaaattgaatatccacatgtagcagatccttaacttacaccatacacaaaaattaattcaaaatggattaaagacctaaacatgagagtgaaaactgtaaaacccctagaagaaaatgtaggtagaaagttttatgatgttggatttggcagcgatttcttggatataacaccaaaagtacaggcgacaagagcaaatatagacaaatgagactatatctaacttaaaactaatgtgtttcaaagggaacagaattaaaagacaacctgtggaatgggagaaaatatttacaaacctctcttgtagggttactatctggaatacataaagaatgcctaccactcaacaataacaaaacaaataacctgatttttttttttttttaaaaagggctgaaatagacatttgtccaaagaagataaacaaatggtgagaaacatgaaaatacggccaggcacggtggttcatgcctgtaatcccagcattttgggaggccgaggtgggcagatcacctgaggtcaggagttcaagaccaacctggccaacatggtgagaaccccatctctacaaaaaatacaaaaattagtcaggcatggtggcgtgtgtctgtaatcccagctactcacgaggctgaggcaggagaattacttgaacccgggaggtggaggttgcagtgagccaagattgtgccactgcactctagcctgggtaacagagcaagcctctatctcaaaaaaaaaaaaaagaaaagaaaatatgtttagcatcactaatcattagagaaatacaaatcaaaaccacaatgagatatcaccttacacccattagggtggccactataaaaagacaaacaaaaagaaataaacgtcaagcatctggaaaaattggaacctttgtacattgtttgtgagagtgtaaaaatggtatagtctatatggaaaaccaaaaataaaaaatagaaccaccatatgatctagcaatcccagttcttgaaatagaatcatgtatcatttaatgatgggaatacattctgagaaatgagtcattatgcaatttcatcattgtgtgaacatcatagactgtatttttgtaaacctagaagctatagccaactatccacctaggaccaccttcatatgtgcagtccgtcattgacggaaacaccattatgctgcacgtgacagtatatctaaaataattgaaagcagaatcttgaaaatatatttacacactcgttaattgtagcattattcacagtagccaagagatggaagcaacccaaatgttcatcaacagatggacggataaagaaaatgtggtatacgcatacaatggaatattactcagccttaacaaggaaggaaatcctggcacatgctacaacatggatgaaccttgaagaccttatgttatgacagataaatcagtcatcaataacatgtactgtatgattgtacttatgtgatgtatctagagcagtcaaacttacagaaataaaaaaatagaatgatggttgccaggggctggggagaggagggagatagggaattgttcagtggtgtcttagaccattcatgctactataaaaggtaccacaaaatgggtaatttatgaataatagaaatctgtttctcacagttctggaggttgacaagtccaagattaaggcaccattatgtttggtgtctgatgaggaccccatttctatttcaaagatggtggcttgaatgctatgctgtcacatggaaggacaaaaagggcctacctagttccctccagctcttttataatgttgctattcccattcatgagggctctgaccgcattacttaatcatcttctaaaggccccaactcgtaatactgtcactttagagtttaagttccaacatgtgaattttgcaggtacacctgcacttaagccacagcgttctcctccagatgccccaaaatccatgtccttctcatatacaaaatacattcattccatctcaatagccccagaagtcttactcctgtatcagctttaaagtgtaagtccaaagtgtcatctaaattagatatgattcatcttgaggcaaattgctctccagctgtgtgcctgtgaaatcaaattgtatacttccaaaatacaatgttgggacaaacacaggatagacattcctattttaaaagagataaatagggaagaagaaaaggtaataggtcccaagtaagtataaaacacaagaagacaaacagcattaaatctcgaggcttgagaatgatcttctttgactctacgtcctgccttttggacaccgtgcagcaagggtgggccaaagacccaggcagccccattcttcatggctttgctgggcgtgccccacaaagcagctctcagtggttggggttgggtgcctgtctctctcccaggcttgtgttgcgtgatggtggctctacaggtctgaggtctcaagggttgcccatctccatggctccatggaacattgccctaataggggttctctgcagtggctgaattcccatgtctccagggaattgcactagtgagggttctcagagcagccccacccaccctggcagttctctgcctgggcactgaggctctccagggcatcttttgaaatctgggtggaggtagccatgcccccacagcttatgcactctgcacacctgcagggtcaacaccatgtggatgccaccaaggttgactgtttatgccctctggaggggaagcctgagccacacttgggctcacttgagtcacatctggggcatctaaggagcactacaccagaattcagtaagcagagacttgaggtggcacagagcagcgagtgctgaggtctcatgggtgcccaagatcccttttttcatacagttttgtcccccaggccatggcattctgggcctgtgatgagagtgacaactttagagatctttgaaatgccttcggagtcattctttcattgtcttgataaatagcatctggcttccttacacccatactaataaccctatcaggcatcttaatatttttatcaaacattgactcagccacactgttggtattctctccataatatacctttatgtcctggccaggctgggaattttcaaaatctttaagctctgcttcccttttacttataaattcatctttaattgatttcttatctcacttttactataaacagtcaagagaagccatgtagcaccctcaacactttgcttagatacttctttcaccagatatcctagtttatcacctgcaagttctccctttcagaaagcattgagacatgggcatgattcagccaagttcttggctatcttgaagactatgagttttcctccagtttccaatatcttatttcttgtttctgtcagagacctcatcagaattgcctttaccatccatatttctaccatcattctgtttgtgactatacttataatatctaagaagattgagcctttctctccagctttcttcttttgaacctttgccagaaacacccttaatactctgttcacaataatctagactctttgcagcatgaatctctaaagtcttccagcttctactcattacccatttctaaagccacttccacattttatgtatttgttacaacactctacttctcggtattaatttccgtcttgtccattcatattgctgtaacaaaatgccacaaaatgtgtgatacataggctgggtgcagtggctcatgcctgtaatctcagcactttgggaggccaaggcgggcagatcacctgaggtcaggagtttgagaccagcctggtcaacatggtgaaaactcgtctctactgaaaatacaaaaattagccagatatggtggcaggcacctgtaatcccagcttcttgggaggctgatgcaggagaatcgcttaaacctgggaggtggaggttgtggtgagccgacatagtgcctctggactccagcctgggtgacagagtgactctgtcacaaaaaaaaaaaaaaaaaaggccatatgtaaatttttaaatttatgtctcatagttctggatgctgggaattccaagtttaagatcaaggtgccagcaggctcagtgtctggtgagggcccagtctttgcctctgtcattggtgaagactgagctggaaccctgccagaaagtaagatgtagtttctaggcttccagccccagtgatatgtgggtgagcttaggagggtaggaatgatacaagataccatgacacaattctcagtacagtgtactctaagtgagtaaaaaaaaaaaaaaaaaaaaaaaaaaatctgtgttcttttcacatagaagaaatgaacagaagtgtgaacattgaaatcaggctgatattagttggaatgccaattctactagtgactagcattctgatatggagctggtttggtaacctgtctgagcctcatgctcgtctctaaaatgaggataagggacaagagcctcataagacttatgtggggaattaactaaaatttcacatacaaagcaccttgtacaacaatggatattttatggccaccctaccttgcagtcactttagaattttgatgaggagtttccagcaccaagaggtgtctacttccagtgagatacctcaaagtatgtggtatgttcagagaataacaagtagtccttacatggtaggatgacagtgatgacattagtatcaggtagcattttggagcatctgttttcatggcactgtgctgagcactttatacttgtcatctttcttttattaagtctttacaacagccttttgaaggagctagtggtaacagcccattttacagttcagaaaaatgaggcacacaaagattaagtaatttatttaaaatcacacagaagtggcagtgtgattttatctaaaatcacacgtaagtggcagaggcaaatactcaaaccaatactcttgaataatgtagtattctaggaagggataccatggtcatgtggcataggatgagatgtgatgagaagggaggttggggccacaacttgaaggatgttgcatgataagagtgaggattcatcagagattaagtcagggaatgtttgatcagatttatcttttaggataaccacttgttggccagtgtgaaaggcaacttggagcagcagggagcctgtggtgggaaggaaggcagtggaccaggagggaactgatcaggcatgaatggggatgttagctgtaaaaatggggaggaggaaaagggggttggaggtatcggtgagctcaagaaaacttggtgaaagagatgaacaaagatactggatttgggtgtggagtcaggtgcctattctttgaagttctgtgactctagccaagccacgtgggttccatttcctcatctgtatattacacacatacctatagaggtgtgctaaaaatggccaggatgctcatgcagagaccctacctctgtgcccacaatactgggttcttagcaagtgaaagtgttggcccagtgtttgatgcttaccagaccttgggtctcagtgagcaggtagactgaacatctgcatcagaatcaccgagggtatttttaaaaagcagattcctgggtcctatcccaacatgtggcactgggatggggcccaggaaacagcaggcaattttagtacattgatcttgagaaccactgggtgtttgggaagctaggaaaggggtcaaggccagggtcaagatttcacaggagaaagggaagagcagaggggagagagcagaactctgcacattgccacaatctagggtgtgggtagaggaatgggagcctgagaaggagacggagggagtgcattcctagaggaagacaggaataagccggcattccaccaggagcacccagctccttcccttcttctttcccctgcggagaattggcaccctgggacacctctttgttggagctgttgcttgcatccctgtagtttcttcctctacctgctgtactttgccatccccttgtcatcactgccatgttctttcctttgccttggagaccactgggtctcagaatcccattgttcttccagcccctgtcccaggtcaggcagtgcgggagctcaatacagaggagctctgtgtaattttgcatttaacacccatcttcctcaatgaactataagctccatcagagcaggaagcaacttttccattcacagctatgtgtcctcagctcctaaaactggcaccagaatgccctcaatgaatattgaataagtgagttaggggatgagtgaagtgttcagctatttggaaacagatttaaaggaaacagaaaatctgaggtggctgaaacatacacttgtggttcagagcatggtgctcagtgggtctcaggagatccgggtctgctgtgctgctgacctgctgtgtggcctgaagcaagttgcttagtctctctgggctccagtggccttaacctatacaaggaagagccctgattaggtaatactcccagttttctaactctaataccacacaggttctataaagcagttctgctgtggcatactttgttcattactgcaaccagggaccacatgaaaagacttcacaatacaggaatgaagagagtcttgagtgcacgtggaggtggtagcagcatggagcagatggggcctggcaggccagagagccacctggagtatagttccaacctctggaaaataaatcttatttttcttttctgggtgatggcaacaagtagaagaaagcctgaatttaacactccatgctgattgaaaaaattatctgattttgaccatttcaaacaaaatgtcacctttacaagcctgatttttagatttgtgctaagtttttagactttgcaatatggaaaataataacagaaaggttattgcctgaattgaaagactactttcctgtgtttgaaataaaactttgataaccttggtctttgattctctgtacagttgaatttcagaaaagagattccagaggcatatacacgttcaaggttcagggacactatagccagagggactagtgtgggggaccttgagcaaagctattgagcaaagtttctctatggctcaaggttttctcttacttataaaatgaaggtcatgcaattgggacacatagggattgaatgacaaacatttgagaacacacagaacaaaatgtttggtgcgtggacccatgttgggtctcctccatcaccatcaagcagcttcttcttgtcctgtctcagagctgggactcagcatggaggtgccttggtaacctgtgtactgatggaaaaccctgaggacttgttaggcctgccatccctctcctctctcccctctcccctcctctctctgtgtgtgtgattacatgtgtttaacactaggtgggctgtaatgttcatcatcgcctactggccttctttgaagacctgaggccccttatattgagtggctgctggaggttctttgtccagtgtgtgcttactgagactcagcagaaggccctggagtggccagaccttgtcattttagtcctggcctggggcagaaacgcccacacagggtctcacttgccaatgtcaggagtggatagaggagagccatcacttgattgagagaggggacctcagtttgcagaaaagggacaggaacagggctgaagggtcctttgcagactacagcatcctggccaggtagctggagcgacttcctgaacacctgtcagctcctgactcttcagactttacagggacccctggtatctctttcctgccttggagaaagctgcagaggtggggctggaccccagggtcatctcctcttgaaagagatgtcacatcatatggtagcaatatcctctgactgagatctggggcttttcatggtctgcccactttcctcagatcctttacagcaagaccagctttcaagtccacccttttcaagatccgtgtgttgtaattagggggcagggagtcaggttaggggatggagtttacatccctctaaaacccaggaagaagaaatgaggagctcacgaccactgacatgtccactactttaatcttacttaggaaatgattttaatgaatccataagtttttagggttggatcttgttcatcagttactactcatgaattcgtgagcatttgtgatctaaagtctgaacatcactatggcttgactcttgttctaaagaggaagaaaacatctgcattgaatgatctccaaatacaaggctagaccatccttccctgctctcatttctagatagtcacaaacagagtagcacctggatggacctcaggcagggatgtagtctcctgtcctgattctctgctggaagttagcattctgtggtgtagatgcaagaaaataggtgtccttcgtggtcacagctgctgtaggcacttcattcacatttacaaaattttaagatcatgtcctcttcttttctaccaatataactacaagacctcacgctttgctagagctcaggcactgccaggtgtcatcatgaggagagcacgggatttcctatcacatgaatctaggtttgaaccctggctctgctgttcaccaacctgttaccatctactacagaggacttctctgaatctcagtctctttctctggcaagtgtgaatgggagtacaagtctgccttaccccattagtgtaagaagccatcaagatagtagaagtgcatatgctttgacagctcagtgtctctgtatgggttagtttttgccactattattgtaaccttgaagaacagctgggcccaagcttcctgttataaagaaatacagtgctctcagctaaaaagaccaccccctgcttacccacccagtccctaagagggtggattataactgttgtggctgtaaacccagccgatatgggctgtaatgtagtaaattatcacttgttttgcagtcttgacgagaaaaataaatgcaattacactcatgaatgttgaaaaatgaagcaaagcaatgcagatcggcacattcgaggtgcttttccaaacgaaaagctgtgtacaatgaatgctaatgggctccctccctcccactctctggcatatggtgtgatgtgatctttctgaattaagaaagcagctttgccaagcaccctggctatgggagaggtggtcatgaacagcccccacagtgggagactcagcaggtggaccccaacttcctctcttgcttgaggacacacaatagacccaatttcctggagcaggcaccagagtgatcctggtgcagcctctctgcttcaggaacttgccatctattttgcagttcttctgccatcctgtgtggcaaacatttgctgaacacctaccatgtgccaggcatgatgctgggagctatagagatgagtctcagatatcttgcccctctcaaccaagggaggccttgtgagccaggcctgatgtgcaccatgtagccttgagtggttcaatacagtggcctccagcacttgaaatgtggccagttcaaactgagatgtactctaaatgcaaaatacaccagatcttcaagtctttgtaccaaaaaaaagggtaaaatgttgtgttaatttttatattgtttatatgttgaaaagatagtgtcttgtgtgtgtgtgtgtgcgtgtgtataaccttttgcaatatggcaggtagaaaatttaaaagtataaatgtggcctgcattgtatttctgttggacagtgctgatctagcagctgcctatctctttattcacatcctctgccacattcccccttgctggtgataccctggtctgtttttttttggttttttgtttttttttaaccacaccaggctctctcctgtctcaaggcttttcacttgccgaaggctcttctcagcaagagcttgcatgtcaactcaactcaaatgtcaccttctgtgagcagtattctctgactagcctttttgaatatgtactccctgttttttgttttgttttgttttgttttgttttatccagacactctttctagtccttatcataatatttggcattttattcatctacatgtttgtgtaactgttttccctaagagaacataagggcagaaggcttatctgttttgttttatttagttttttttaatgtgttctgatctcagtgtctagcacaacaagcaacacatagtaggtactcagaattttttttcttaaatgaatgaatgaataagtgtcacgttaatttcacaaaagaaaaaaatattttgattattttgagatgttgaaaaatacatttgaaaatacttcccactgggtcttaatttatcaatcagttagggaatgtctaggcaagaagcatgtgagagatgaatgatttaaatggggtttaatgaaatagagattggatcagaatcaagggaattaacaagggatagtgaagcacccagggactggcaactttgggaagccattaccaccctgggtctgaagggcaatggtaggaaatagaaatggtgctaaagtgttaagggattgcttgacaggctatagaggaacacagccaccccctggtcttctgtccatggccaaactctgccattggttaaactcagctagaagcagagagtaaggaagcctgggagatacagactacagaccactatgtctaggttggtgggtgaaagtggtgatggaggaacagagaataatcgtcatccttaaaagacctagaaagctatttccttaatgtgacggagcctgtctattccaaactaacaactgatatcctaaaaatataaggatgctcaggaccactaaaattatttaacatttattcagggatttctagtaacagaatgggaaatataattatggcataaagttattatttgcagaggattttattatctaccaaaaccccaagagaaataatgaaaaactattagagcccaataaaagagtctaataaggtgactagttagggaataaatatacaaaaatgaaaaattttctaaataccaatcaccagttaggaaacataatataaaaggattcattctgtaaaagcaacaaatataaaagcctgaggaattggcttaagagacaatttgcaggaactgtagaaggaatctataaagcaaaactgggaaaacaaataagtaaacggaggtatttcatttctggatgggaaggcttggtattttaaagctgtcaatttaaaatattgaatgcatattgcaatagaaatgtataagcaatgttataaaatgattttaaggtttatctggaaaaataaatgggcacagatcatcaagcaaatgttgaaaagagaatgatggagaaagacttctacttccaagttttagaaatatatcctgaaactaaaatagttcaaatagcttataccaatcttagaagagacagatagattaacagaataaagtatgtccttaaaacagaggggtgtgtgtgtgtttgtgtgtgtgtgaatgcatgcatgtgtacatgttatagacaaacttcacatttctaattaatgagacaggtcaagatgaaatgataatccaccaggggaggatgtgggttcttcatactatgtaccaaaatatattctggataaatgcagtgcatttcagttaaatgtaaaatttggaaaacatagatgacatttaaagaataaataaatatttaattttggggagcaggacagttttctgatgataccattgaaggtacagccataaagaaaaatattatatctttgtccctaagaacctaaacatcatgaaaatatccatatcaaactggctgggcacggtggctcatgcctgtaatcccagcactttaggaggcccaggcgggtggatcacgaggtcaggagatagagacgattctggctaacacagtgaaaccccgtctctactaaaaaaatacaaaaaaaaaaaaattagccggccatggtgccaggtgcctgtagtcccagctgctcgggaggctgaggcaggagaatggtgtgaacctgggaggcggagcttgcagtgagccaagatcgtgccactgcactccagcctgggtgacagagcgagactccatctcaaaaaaaaaaaaaaattaaaaaaaaaaataaacaaactgagctcagatatgtgcattatatgtgcaaaaaatgattgatataattaacatgtaaagaggttttaaaaatcagtaaaaggaaaaataatccggcagacacacatcagtgttggtgagacctctggcaaccaggtggccatacactgttggtataagtacaagttggtacaatatttagggacaacaacttaaaaagtttctgagcagataaatgtacactttatgtcttcatgacttcatgaaattctgggtgtgtgacctatgacatggtgcttgacctcccagagtgtcagttattccgttcataacatgagaagataaatcaacttgcttcacaaagtggctgtgagggtcatttgggatgattggcccaggaaatcattggagttatgaaaccctgagaaaatggtgtaccttcttgattaatgtggggttgtcacattttgcttctcttccccacccccagccacttgaacgctatctactggagtcccttctcctgacgctgcagctcattgaggcacaaaggagagagtaagagccctaaacctttgtcagggtaagcagggctgcactgagggtgggtgctcagctgggctcagtaagtatttagtaccaaccacttgtgctaggtgctggggtgacaaagactctccccttgaccaaattttagtcatgctcctctgaattcccttctcaactaggctttgattttggctatcttgtctgtggcctgtctagcccagttttagcaagaactctgctaggttagcctactgaggatcccccaaccccttgacatctgtcagtccagttgggcttctataaaaaagtaccataaactaattcttagcaacagaaatttattgctcacagttgtagaggctgggaagttgaagatcaaggtgctagaagattccatatctcgtgagatctctcttcattaaaaaatgacaccttctagttgtgtcctcatgtgatggaagaggcaaggcagctctctggggtcccttttataaggacactaatcccattccttcatgacctaattcatctccccaaagtcctcatcgcttaataccatcaccttggcggttagcgtttcaacatacgagttttggcctccacaaacattcggatgatagcactatctgatcatcctggcctgccttcggtaagaaccctggtaagttgttttagcaagaatctccctacccttgtctcctcttggtaatttttcatccactcactctgttccttggctctaaatccccagctgtctttgttatatttgcctaatttctctcctccattgcaataatcttgaataatgtcttccttaccattttaacaagtgtcagagtaattttatttttaacaagtgttaccatggcaggtaaatctcagtctgccccaaagtagctttgggtctaataggtagacaggtaggcagatccatgattgactctatggaagaggaacacgtattcatgaattcaacaaacatgtactgagggcctgtaatatgccaggcactgaggatacagctttggacaagatactccagctccttgctctcatgaatctcacagtctgatgagagagatagatgataaacataaacagaaacagaaaaagtaaaaagggggcaggtgtcattcctgggattgtagagggaataggggtcccgcataaacaggagacaccttctgcaggagaagacatatgagttgaatctccagtgaatttaactcttgcttgtgggctacaagattcgacaggttcagagctcatctaagcatgtttgtgaataagtacgatgttggatgactcaggagccagcctatgatttgccgattgtgagtaggaagacagctgaggtttctagaggcagcccagctgagaggagacacagacagggagattatcctaataggatttcacaaagaccacttagcagtcgctgagctccagggaaaaacagttatgagctgagggtggggaaatagtcaagaatctggcaactccgcagaagctcggagagaaaagctgacagccgacagacagaacaagatgatgcttgcaaaaaggttaaaagaatagacaagagagaaaaaatgtacgctgagagatatggatggaaatggaagtgcattaatataacttggggatatggattaagataattctagctctaaggagcagagctaggacttactcattacagtacttcacactgtcaggaaactcttggaaacagatgtgggcagtggaaggtcaggatttggatggaaagaaagaatgtgtgaataggcagaaacaggatagctagttctaacccctactctttagagaaaaagaaagtgaggttcagataaataaaatgactttttcagagtcatgcaacatagtgagtgctagagctaagagattagaaccttgtacattgccgatgggaatgccaaatggtgcagctaatgtggaaaacagttggcaatttctcaaaatttaaacatcaagtgactatgtgacccaacaattctgtttgttgggcatgtagccccagaaattgaaggcatgtactcagatttgattcatggtaggttttctggctagtccagtgcccctttttactgcaccccagctgttgcttccatcttccattttctctcccttttttctcctcctttttccctcccaacatcctatcttcatccctcttctttcctctttatacatgtagggtcaggttggggtctaagctatagctttgccacttaataaatacgtgaacttggtttttattgtcctgtcattgacgatgactagatgagggtcctccagccctaatagtatatgcatttttacatactgtgccgtcacatgttcaggaactgcagcggatctagtattgatgagaggacagtacctgggaggttgcccagaagacaaccctgggggaacctgggggtgttgtcgagaagctgatacactcccggtcttgaacaactgtcatgttttctcaccctttaattgcttgtttcgtagagcttaaattctctttaattttcctgggattacaaagcagtgatctatttatgtttcctggagcatctcttcttccagggtgagttttaaaaaaaaatctttgcgtgtgaaacctactgtgggggacacacaatcttcctttaagtcttgtacttttccccctctacttgaccactatatcagtgggggcagttacctgatggtgttatttgatccaaattggtaatgctgaatttgcctttgctattttcccaatttacttggttacagtttgactgctctcttatgggagaggaaattgctgaggacttgcaaaaagcctctgggggctttgtctctaatctgtctctaaatttattgaaattctgacactagatttaggtctattgaattgtcagttgatcctcttcctggggtgggtggtcccctaaagcttcagtttgctcacctgtttcaaaatgagtcagctgctttaatgagaggtccttctgtttcatggacttttgtcgtttgtttttctaaacccattcattttcttgtctttgcccatttgagtcctcatatgagataactggtttctgcctgataattcccagaatggctctgggaagggatttagggaaggagtcaatccaaaatgggaaaaacgagctccaagtggaatattcacacctttccaatttgttctcttcaaattaggagctatatcattcagcttttctgtccattacacattttttttttccttgccaacagtacttttccatcttgaaagggaggatgggctgggttcgatggctcatgcctgtaataccagcactttgggaggctgaggtggtcagattgcttgaggtcaagagttctagacaagcctggccaacatggcgaaaccatgtctctactaaaaatacaaaaatcagctgggtgtggtggcgcactcctgtgatcccagctacttgggaggctgaggcatgagaatcccttgaacccaggaggtggaggttgcagtgagccgagattgtaccacagcactccagcctgggtggagtgagactctgtctccaaaaaaaaaaaaaaaaaaaaaagcatgaacatagattactcttctttcattttggcccaggtggcacttaaaacctatagcatgaggttggggcagtttctgagtttcagaattaataatatttttgttgttcattttaattcattttgttcatttcagtcaactttgaagatggaggttctgtgaaatggtgtgcaaaccaccatattttctggaatacctggcattctttccactataccatgctgtgtgattataaatacactctttcatagccagtatgacatgctcttattggaaaaggtttccaatgactgtattcactgaaatggcctatttatatatcaagtgtgtgattggatatgtgcttccctaagactaaaacaacaacaaacaaaaggcccagatcctgggttacccaacgatgctgccaggtctcccctagttccctgctcccaaatgttcatgtaaagttgccacaggaggtctcagtagtgagcgccttcaaactgggcaatgggattaggtttttagaagatgatttccttgttttcatttcgagatcttaattttattgaagatgcttctgctgttggtggtgctggtataactgatctaatttaatttaatttgcttctttgcaaagaaggcaatcccttgcccagctgctgctctgggcagagaggaagcaagcaggcttggagataagccatgaactttatcagacctctccaagctttatgctaatgagcaatgcttagagatttcagaattttttcccccagtgattgctttagctactgtactgtttcctaggcagtaagacatcatcatgagtctctataggtgagggagatgtgatcatctgactggtctgttactctgcttcaaggtaccatgcctgtggtgggtgcaaggcacatgtcaggtggtgttaggaagagtttcccccacccattctgtcacagtgtgcctagggaagcttcctgtgagaattctgagtgatagcaggtgtggtaagttaaacagtccttgattaaactctggttgtacctccctagtttctttcctttgtcaaggtgttcaaacttgctatgtcttggcctccttaaaccatgcgtgaataggatgtgtgcttcaaggatagagttccttattcctgtctctattttcagtacctagtaaggtgcctgccagacagtaggcttggtaagtatttgccaaatgaacgaatgaatgaacaaataaaaggaaacaaatgggtacgtatggaaaggaagatggaatgtcaccattacatcctactctccagacagaaacactctgggtataaggagatccagagtcatgttgtgacgaggtattgtgagccgtaatggtactgcaggtctccccagttctactccaatgatttgatttggtgggttggaaaggatttgttgacacagatctagacatatatgtgatttgataatgggtggtacagaattagcccattttccatctggtcctgcccagatttgctcagccacggggttagtctattcagatccagctcaactttgctgtattttaggagcccatctctcaagatagtagtgattaaagtcagcctgctggcgcaatcctggcatgcagtcattctgaggaaaacgtatacaaggttgtgatggttaattctgagtgttaaattgattggtctaagggatgctcagatatctggtaaaacattaattttgggtgtgcctgtgagggtgtttctagatgagattagcatttgaatcagaagacttagtaaagaagtctaccaatgtgggcaagcttaatccaatcgttcgagcaccagaatagaacaaaagggcagaggagttcattttttctctcttttcttgagctaggactcttctcctatgcatgggcattggagcttctggttgttgggctatcagacttccagacttacaccttctcatcctgggttctcaggactttggcctcagactgagagttataccatcagccatcacctcttctagttctcaggctttaggacttgaactaaattataccactggctttcctgattctccagcttgcagacagcatactgggggacttcctggcctccataattgcatgagccaatttccataagtctcctcttatatatctttatatattctgtcggttctatttctctggagaaccttaactaatacaaagttcttcatatgaggcttctgcttagttttcttgattaagatggtgattcctgaatgagaccaaaatactcagggccaagccacatgagctaaaaggcactgacaatgctgagttaatgtagatatatcagaccaaagggtgcctgagatttagcttctttgctcttatcctgaaatgcagcaaagctgttgcttcatcatctagcttctgactctcagcatccccatctcctgatgccttcacttgaacatctttgctgggcagctccaccaccatctttgactcctcaagtatgctagcaacctgggtggaacctgcatttgtcatattctcttggccactctgagtgaacttgtgttcactctctagggaggtctaggtttcccagtgggtttctgcagccccacctacctctcagtctgttctcttctgcacccaagcactgtaaaattagtacaagcctcactaactagaaggcatgttgataggtcagatgagagggtttgtgaaatagaggaggtatctaggctgggcttggtggggaacagaatccatgaatgaaggctgtatctctaggatgagccagtggagaaaaatcctcaaactgatggaaaagaaaaaatactctggctctgaaaatcaaaggacatagccctctgaacaagtgtgattagtattctaaaaaaatatatgaaggaggcatcaaagaagaacccattggcattagcaagaggttttagggaccagatacgaaataaatttctaaaaaaaaattagcaggttttttctatgtgcagtttttaaattgtaatatatagagcaaagaaaaacccaatcataacaggacagaatatcttttaaagcttgggatgaagataaaaaaaatgcaggaacaacatgaaaactttaacacagaggcacataaaagaagacttgaatacttggaaaaatatcatgtttctgaatggaaacgtgtattcatataaatatgtcaattctcccccaaagtgattacatatttatgtttttaaaacttgacaaaaatgattgtaaagtttggatagaagatgaaatgcataagaatggcaaaagggacattttgtcccttaatagaagggagatttgcacagcaaaaagttacagagagttataaaataacttaatactataagcaatttagtggctagtgaaataaaatgtaattgaaacagaatacaaaataagataatgaaaatgatttgtgtctatgtaaatacttactatgtgataatggtagacttaaatcgttttgggaaataatagattatataattaatgctgttaggaaaatcagctttttagagggaaaggcagatcattatctcagtccgtacataagcatagattgcaaactatggtgtacaggccaaatctggtttgctgcttgttttgtaaattaaatgtattgaaacatagccacacccattcatttacgtattgcttgcggctgctgttgcaccaccatggcagaactgagtagttgcaaaagagacgatatggttgcaaagccaaaagtatttactatctagctctttacgaaaaatatttgctgacccctgctttgacacatggagagcaggaacttgagctgaagcaatagcaaataaacaggaaacatcttattctctatggttggggtgacatatttatttttgtttcaatagggacatttttgagagtaaaaggaataccccaggtaggcagggaggtattataattatagatgcctataatggatcaagaattggattggaaagggagaaatgcaagacagtgatgattagagttgagtaagattagagttaataaagttaagaataatagaaatcagcgttgttaaaagcacagtcttttaacagcagaaaggagccttgtgagtcttcatggatctttagatacttttgatagaaagtagtaactcagttattctcagtgtcacaccaggcagaatgctatttattatgcaacataaaagcagaggcaaaaactcaagtacttcttgagctgtgcagggaacagaatagatgtaagacaagaacaaaatgttcaactctaatgagaggataagaacattagaagactagtatcttggatgtttgaaacagtggagaatggccaacaggaaggaacagctgtaattaagtgcagatctaaagaagtggcagaaaaactgtgccttgcaagtttgacttagcaacgagccagctaccaagagccctaatgaggaccaaagatggaagatgtctgtggggagtgagacccgggtaatcagcttgttttttcccgtctgtgagttttccatctgatgagaagaaagggcgtcaggaggtagactggtccaagggctgctctttgaagacacctgatctcaaatcactaccatggtcaggaggggatgctccaaagtgagctccaggaaaatagctttgcagataagcccatgggcctctaagcaccttccctgttgcttggagaaaaaggaccaggcctggccatgggttaaaccagcagctggcctcacaaaggaatgtgtaagtgccactgcctttggggttgacactgcagtgcagtgggtgtatagcaactgaacaaaaaggactgactgcctaccactgggggatgccaaaagactcgcctgtagaaggcacattcacaacactggttaatggcccagtctcctaacataaataaaatgcctccatccttacatatccagcccttgccataatgagccacagtccatctcacgttaacaaatgccttttcaggttgggcctgattttccttagttattccggttcggacgttaaaatgacagagttagtaattggagggcttcagaagaatcaattagtccagtgcttttcaacttgaggacctgggaatctgggaaggagaagtggtagtgcttgaagcgcttttagtatttcaagatgcctgtgcctacactatacaggttcaaagaaatctcaagttctttgggttaggtttcaaattcaacccggtgaacaaagctgtgatctcatgctgctcagaaacctgaaggggggaacttgctttgattaggagaaaatggaggaagaggtagtccttcacaaattcagtttatgcagtggacaagcctttcataacatgcagcccagggagaaatgtagtcatagggaaagttgagaaccccttggcttatccattgtgtaatctgtgtccttccatttaataggtgatgaaacctggacccagaaggaaatgggacaaggtagcacagcccaagttgtaggaaacagaaacagcaggattaacttcctctaagtctgagatttaaaggggtagacataggcatctggagacctggagttcttgtaggggtgaagagctaacatttattgaggacttactgtgtgttgggtgctgttctagaaaattcacacacatcgtctcatgtaatccctagagtgatcgtgtgagttagagattattctctgaaagattcagaggaggaaaacaaggttcatggagtctaagtgacttttccccaagatgatgtaataataatggagctgggttctaacagagtgtgttgtggcccccagggctgatgctctgcccactgtaccaccctatcttggagaatgaacctctatgggttttggctaccctaggggcatgtgaggagggagtttcaaaattgtcctcttgggaaaaagaaaccactggacagtgcctgcatctgatctgtttccactttccccagaagcagtacatgcctgactttctgtaaatgttggattaattgatttaatttagttgattgtcactccaaggagttctgtgaaagaacaatggaactctgaattcaggcctagagcaagtgggaaagacttaggaggaggctggttgtcatttaagagaaagtgggacttcctaaaatggacctctttcacttagcaaattccacttaccccttggctgtcagaaagacccctgtttcctcagcatgggtactggtataaaaacaggcacatagaccagtggaacagaatagagaactcagaaataagcccaaatacttacagcctgatcttcaacaaagcaaacaaaaacataaagtggggaaaggacaccctattcaacaaatggtgctgggataactggcaagccacatgtaggagaatgaaactggatcctcatctctcaccttatacaaaaatcaactcacaatggaacaaggacttaaatctaacatcagaaaccataaaaattctagaagataacatcggaaaaaacccttctagacattggcttaagcaaagacttcatgaccaagaacccaaaagcaaattcgacaaaaacaaagataaatagatgggacttaattaaactgaaaagcttccgaacagccaaagaaacaatcagcagaataaacagacagtccacaaaatgggagagaaattttgccatctatacatccaacaaaggaccaatatccagaatctacgaggaactcaaattagaaaaaaaaatcccaacaaaaagtgggctaagaacatgaatagacaattctcaaaagaagatatacaaatggccaacaaacatatgaaaaaatgctcaacatcactaatgataagggaaatgcaaatcaaaaccacagtgtgttaccactttactcctcctgcaagaatggccataatcagaaaatcaaaaaataatagatgttggtggggatgtggtgaaaagggaacactttacactgctggtgggaatgtaaactagtacaaccactatacaaaacagtgtggaggttccttaaagagctaaaagaacaaccatttgatccagcaatcccactactgggtatctacccaaaggaaaagaagtgattatacaaaaaagatacttgcacacacatgcagcacaatttgtaattccaaaaataggaaaccagccctaaactccatcaatcaacaagtggatgaagaaattatggcatgtatatgccatggaatattacccagccataaaaaggaacaaaataatggcatttgcagtgacctagatggaattggagaccattatcctaagtgaaggaactcaggagtggaaaaccaaacatcatatattctccctcataagtgggagctaagctctgaggatgcaaaggcataagaatgacacaatgactttggggactcggggaaagggtgggaggggggtgagggataaaatactacaaattgggtacggtgtatactgctagggtgatgggtacaccaaactctcagaaatcaccactatataacttagtcatgtacccaaataccacctgttttccaaaaacctatggaaaaaattttttaaagacctctgttttctaacaggatggaaacatcactgcctcttgccctgtcattgatgcaaagtctaaacagtctcaaggtgaacatggtaggcccagggaagtcctgggagtgtcacctgtgggtggccttcccttcagccagcagatcactcaactgtggcagctacaggtctgtgagagacattgatggctgtggcatgtgactctaaagccccatttagtgtcccagtgatgagggctgaacacgtatatccaagttgatgcccatggatggagcaacatctcgtgccttgagtgcttacttcctgggcagattgagagctgtgctagtggtgttcacgcgaccctttcaatccatctttacccacctccaccctgctcactgccctgaaaggctggcctgtataggctctgccaatgcccttggtcttctgtatggccagaaatcagaggggggcggggagtaagagtgttctgtgtacttattccctgggccttccctgtgtggttgctatgggccagccgtgtgtcttgactgaaggttgctgttcctctcaaggggatcttctcgcccctgttctctcctgctggcttctgttaacgacttcctcccctaatcccttccatccccgtgggtgctctgctacacttacccttgtccttgcccgctttgtacctttgtaaatattccctttgttaacttgccttggattctcctcattcgaacatgcccagggtgaccctgattgattctctaggcattaactaatttgatcttcataaaaactggaggacaaggagactgttattatcaccaccctcatttttaaaatgagaaaacacaggcatagaatggccccattgttttctccagagtctcattgtttgtaaggagtagagacagagtttgcatctggcttgttcctgcacattttctaccacagcactagggtacctacttccattgattcttttcgagggagacctaagacacaggaaaacaaaggaaaaaatcaggctctgtagccttcttggaacctctgtccccaggcccagtccttatctcaactttccagagctccccacttcagaaggtaggagccaactagccacatgggaaaccagagctcctgaggggcagcgaagagaaccctaaagaggtcattccccagacagctgggcttgcaactcattcacttaaattaaaactttatcccctatggtgtttgaggctcaccaaatgcctgtagccattgtcccaagctttgtattaagcaagagtgcctcttcttgcagcccctagaagccaagaatgtgagatcattactgtggtagtttgcttatgaagggtgaggagccccagcaccacagccatggcgaacatctggtacagatggggccagtctcagtccttccatgtatggctttagtgctttggaagcttttgccttaagcctgacatctgcttctgtgatgcattttgctgagctctcctcagagggggcggtcaccacaaggtgttccattaggtgtcttaataagccttgtaactgcagcccggcatgcctctcccctgcagagctgctttctgcatgaggatgggaagggtggatagttcagacataatttgcaatggcagcaggaatattatttttgcgttataaagcatggcgagtgaccttatcaaagtaggagaagtgagcaggcagcaagtgagggcatccatggttctgggtgacacacggaggctggtgggtggtgggcgtgatggtggtaaggttttgaggccctcagctgccttgtagcgtccctgggggctgcaggatgctcagcttcccttgcagacccctgcaagttctgtctttaatagacctatgctgggccaagtaggtgtggctgtctcatgactgagaacaaggattttgtctgttctttgagggcacccctgggtttaaccctgagccctggaccagctggaggtctgattctttacctgcccagttcttctctgccatcatttctcagaagcttgtgctatctctgatttcctgaggtgttctgggataatctcgcttgcccttaaccaagtgctccatacatgtcccatttctccagaccagatcacagagctctgttcatgcctgtcttggactcctgcatccagctcatacccagggagttctctgccatgcccttcctccattgcttgtgcagcaggtgggctgtgtgacccacgtgggtatagcaggtgtgtgccctctcaacaaggagagtccaggattccagacttttttaagtactctctggagcattcgtagaaaactcagagtcagatttttctcagaccacacactctgtcacacacatgtgcacacacagaaacacatgcacgcccttcaatttatgattataattatgatttaggatgagaaacaggtttatataaaatcataaacctgcatatatggaaaagatgaccttggatcaccaaccaatataacactcccattttacagagaaggcagttgagatccagaaggagaagtgacttggccattaccacacaagacagccctttagctttccccagtctggacctctgaggggcaagaacacccgaaacagaaacaacagtggacatcgagcaaggcactggtctgactgctccgaggatcctgagtacattcacacactcaggcaagggaggggtgggctgcttgcttaccagtgtctagacactttggtcttaggcagcccccttctcccacaggggcatcttcatccttaccttcatagtaacaagggatgagagctgaatctgatggtccccgtcaagcaaagcactagccactcccagagggctggttcttggagaccgcaaactctattgtcacattggcagaaggtgctgggagaatgaacctgaacaggtgggtgggatagagagtcatggaatggcaggcagggaccatgggtttcctccagactaggcagcttgccaaatccccgtacgcccatctcctagcatggggtctgacccaaaacaggggctcgaactgatgaatgaacaaacgccagagcagtgtgaagctgattctagatatgttgaaggtacccaaggactttgtatttttggtgagtcaggagaggggagaggggtcagaagggaagcatgagagccccacttagcccattgtcatgggggggaagtcatggggagtggtcagcatggattccctctgagagccccagccaggggccttctgtcactgtgagtaaccaaattgtttttttgaccaagactttctggaccatgaagaaaaaaaaatccattgtcatttctgaaatcctggtcctggaaaccaatgaaatcacctgagcaaggactatgactctcatagaaaggaccccttaattctgatggtaatgtggatgctatggtggtgggagctttggcatcaggctcatatctaaagatgagtttataggagttctcatttttctcttcatgccttttgaatttggtaggcttgcctccctgaacccggggtatgttttcatcacaaaaagatttgaaaaacactatgatttctaattactggtgctttcctattattactgtgactgcaatgaccgccaatgctacttcatatgtattttatgggagtgaagtgaaataatgaatggaaagtgcctagcacagtgcctggcacatagttggcattcaaaaaacaggcctttccttctctgatgctcacctgcgtaaatgttgttcccatgtcctcaatacatacacttaactactttattttgaagttttgtgttttttctcattatcttctattgttacgatgaattttactcaggttcttgatctttcagttttcttggccaagtttctgagattttccatgcaacacactcgcatgcattattttttcctggctggttctactaatagaattttactcctaaggaaggtgatgtgctttttaaggtcactgtaaagagatgacatgaggtcaagtcttaccccttaattccctctcattagaatgtggcacccagaattcagccagagatggctttagtccaatttggaagccctccatgcttactttcctccttggagccaaagctacaaccatgggcatggcccctgttctttgtatacctgagggagtgctctgccccaaatctttctgctcccctcaatagcaacctattacacctgccatattcttactattgctcaactctaaattcaggccaccagaggttatcacccttgccaggtttctttggagaaatgacaatttgagatgctaccatctgccacatttacctgaattacctcaaattctggagactctgtttcccaaaagaagtcattgcttgggttgatttctgacaggttcctgcctagtagcagctgcccagcagaggccgtggtgggagcagtcagtccctggctttgagaaacaaaattccccaagggaactgcagaaccacactgtacctgaatccatcagcatacgaaggccgggtgtggcatgagatgtgcactgtgtaattgcttctttacctcctgcctgaaattgtctatcggaagctattaatagctatagtttattttccaaatctctttagggaaccaacatttatctcagacaggcagaaatcttaattgtggagtttttaagccagaagttccttggaagggaatataatccacatgcttatttagcaggtgaagatttagggatcccggaagtgaattagcttatccaaggtcatactaggcctgactagatgggttctgtggtctaggtgttcgtatctccctcttccaaattcgtatgttgccaccgaatccccaatgtgataattttaagaagcggggcttttaggaggtgattaagtcatgagggtggagcccttgtgaatgggatttgtgtccttataaaagaggcttgagggaccccctctgttcctgctgctacgtgagggcacatagaagctgccatgcatgaagaagaggccttcatcagacatggaacctgccaccaccttgatctttgacttttcagcctcaagaactatgatcaataaatttaggccaggctcagtggctcatgcctgtaataccagcacttttagaggcgaaagtgggcagattacttgaggtcaggagttcaagaccatactagccaacatggtgaaaccccatctctactaaaaatacaaaaatttgttgggcatggtggtgcacttctgtaatcccagctactcggggggcggaggcaggagaattgcttgaatctggggggcagaggttgcagtgagctgagattgtgccaatgctctatagcctgagtgacagagcaagactgtctcaaaaaacataataaaaataaaaataaataaacagtctaaggcattttgttatagcagtctgaagtgaagaagacaatggattttccaaccctggcctgacagagtgtagctactcagctcccttgtagcactggctgctgatttgtagacactgcactcttcttcgttttgcatgtctcctggagctttggggatgttcgcagtgcagccaccataaaaaccacttccaacctgaggaggaagacctgtgaacctgagtctggctgcattccatgaaaccaggctgctgttggagaatacaggagttttctgattctaaagatctttctaagagaaggtcttcttgtaacaatgatttatgccaaaacttaagagatgtggaatggagctggaattttttttaaaaattactgtgatgattagaatgaacgtggttcctgtcacatgctgagacctcagtttgggactgatgatgaagtggggagcagggcaaagctggggacattttaccacttataatgcacaagtcacaggccttctggccaaattgcagtgttttaaggagagtggcaaactttggcttcagctagattgaagcttttttccttttccagattcacaaatacttaattacttcaaactagctattctgcaagatacccacatgtgtgatatatctcttgtaatagttaccacaaacttgtgaactagacttaggttgacattctcgtacatatagtccagaaattcaagaagttatgaaaatggagagagagattatgtgtgtgtgtgtgtgtgtgtgtgtgtgtgtgtgtgtgtgtgtatttaacactaaattcatttggctgtcaaacctgacgcaaactgttatgaagctatctgtagcctttgtctcccatggtatgaattttgatatgcctcactgtggaaatatttgtgtgtctgagcccagaatgttgccccagatctcactaggactgttttatgggcccatattacttgtctaaaaacccaaactgttctgaattctgagctgtgtttgtcctgagtgttgtgatcagaaatgagggcatggattatcatctgtgttttaaaggtggggaaacagagcttcagagaggttaagtgatttgcccaaggatgttcagctgtgtaatagcacagcaaggtccagacaaatgcagattttaaaggagctttgactcattagtgggccttgttcctggtgagtggaatgtcggagctctgatgctacctaagaggaggcaagtaccaaacctgcagctggatggggtgggatatctgctttgtggctgagccccagctagcagtggggttttgaggggacagggtgtagcatacctctcatggcaagggtgcttgggaaatttagcaggctgtcagtagccttgccaaggagcctggtgttgaagactcagaagccaaaggccaagtgagccaaggcaaaaggctttgagtcaagtagcacgaaggactccatgaacaataaggagaaaggtagaggcttcttgagcaggaaggccactagggatctcccaaatatgtggggatgctgggctccaagtagcaactcatgctgtgagtatggcattcaggcaatgggcaggcagagtccacaggtcaaagctgaggggttgcaggaacaggcatttatacccattgttgtgagttgaattgtgtctctctaaaaaagatgtgatggctggacatggtggctcgtgcctgtaatcccagcactttgggaggccaagatgggcagatcacttgaggtcaagagtttgagaccagcctggccaacatggtgaaaccccgtctctactaaaattacaaaaattagctgagcttggtggtgcatgcctgtaatcccagctactagggaggctgacgcaggagaattgcttgaacccaggaggcggaggttgcagtgagccaagatcgcaccattgcactccagcctggacaacagagtgagactcagtgtcacacaccaaaaaaatgaaaataaaaataaaaaaacaaaaaagatgtgttgaagccttaaataccaatacctcagattgtgaccttatttggaaataccgtcattgcagatgtaattagttaagtcatactggagtaggttggccccaatcagtatctttgcaagaaggtgaccctgagatgacacagacacacatggagaaaaacatgtgacaacgcaggcagagatgggggtcacgcagctgtaaaccaagtaatgccagggattaccagcaaaccacgagaagttaggaggaggcaaggaaagattcttccctataggtttcagagggaacatggtcctgccaacaccatgctttcaggtttctggcccccaatagtatgaaacaataaatttctgcattaagtcacccagtttgtggtactgtgttacggcagctgaggaaaccaatatactagtaaacaacattaggccagggtatacaacctccactggcgttgggatctcctggggtttgtctaaaaagtctcattgtcctggctacaccccagtctaacttcattaggatctcagcgggtaaaccccagctattagaatttttaaagctcttcaggtgatttaaaaacaaatttgcaaaccacaacctagagtaccacttattaaagatcttaaacaagggatccagttcccagtagtaacagcaccagttggctttcacgaccctccagactatgccataccttgggatgtccttggtcatttttctccacccatgtttttctcttcactcttctcagcttttggccagcaggattcaagggaatcgctgctttcccttatttgtaaagcatgtaggaatatctggcacacagtgagtgctttctaagagtttgctgccattatttctccaactgcccttaaataaaaccctggctttcttaatcctcactttctggagggcaaccccagagtggtaggattttatcatgctggctcaaaaagccatttcttattatgcatgaaaactgtgccttactttcctttaattaaggctttttcttttctttttttccaatttgcctgagagctagatcatgtgaagggcgctttaaaaaaaaaaaaaaaacagagtgaacacagagtaagtgtgcccgagcttcagagtgacattgagagagctttttgctctgagactaaagaaagccatggatcagaatcctgcccaaggtgggaaaggctgatgggcaaccagggaggccgtgtgagatggaagtccctacgaggtatgcaagaagagcctacctccagcacctgtgcccttcttctgcccaacagatccctcctgcagagcccagaaagggatcatattgagccctggcctctaggaggtcatagtccagcaggggagatagatacttaaagtagccaatggcaagcagtgataggagatacatgagtcctgtttcctggaccaaccctggggaccaaaggtgtaggagcctcaagtctcatcatcccaagcccaagcacaggttcctatataaagggggcaaggactccccagaggttcccctaggaaggatgagcgggggacacggctgggcgggcagccaatgatggccactacactagacattggtgaaaaaatgggaaagggagattgtcaccaatttgtattggaatttggattccctgccatgagggagataccctccacagagaagtgggcacccatatcaggtttaaaatcagggaagggatgtgatttgtttttatatcccaacccttctgatcctctcctctgtccagcggcccattggttacagcccagatatcccaagataatggtgggatcacagagcaaggtcatggtgtagaccctttggtcagaagcccatacaatacagggatccccaactggtcctccaatgtccagtgtttcattgatctcaggaaagaaatctccagcttcccagatccccgttccagcctggctagctcagtctggagcctctgattaaaagggtacccagaggggcaagggctcataatatggtttgtccttagacaacagactggctttttatctgtggtttcattttatcaacagtttttgggctgagcgcagtgactcacatctgtaatcccaacactttgggaggctgaggcggatggatcacatgagttcaagacaagcctggccaacatggcgaaaccctgtctctactaaaaatacaaaaacagcagggcgtggtggtggacacttgtaatcccagctactcgggaggctgaggcaggagaatcgcttgaacccaggaggcagaagttgcagtgagccaagatcatgctactgcactccaacctgttcaacaagagcgaaactccgtctcaacaaacaaacaaacaaaacagtttacgtgagggcctggtactccaaagctgccacccagtttggaaaaagtgttcctttttccctcttacttctccgaaaggacagatggatatctgtctagggtgcaaatgtgaacaccaagagccacctttgacccctctttccctcagtccccaatcctatcccgttttcctcctaaatgtctgctgaaattattctattttctcctttgccaccaggataccatcatctctttcctggcagtcactcttcactggacttttgtttccctttggcctctgtactctgttctgcgtgtagcaactggactcttcgttgctaagcactggaataggctctgaggacccagcaatggataactcagatatggtccctgaataaatacatactgttaatgtagtgagtgttaaatgctaccaaggaaacaaatcacttgccttggtaggcatgagctgtttgagcagactggactgcagcagacctggctggatccaggggcccgagattggtccttccctccactttgatggcagggcatgggtggtgctcttggtcaccatggtggaggaaaagatgagctctcaagaggtgtggactagggcaggtgtcacaataggatgatagcctggtaagtgtgctgaggggtggcggaggccagatacctgctttcccagcagaagaccatgcccacatcagaacaaggtgaggggacctgtgagtgtcaggggttgtgggttgtctgaggcagcaaggtgctgggcccactcacagtggggatccaagggtcctccggatgggcctctgtgggctccagtggctgctggcatgaggaaagaactggagctgaatccagggcccacccccagctcctgtatgactgtgggacgcccacgtccctgctttgggccttgttctcccatctataatatgggcaggaagaaggagacagggctggttactgtccaccctcaagaagtgcctgtcattagggaaaccatgcggtgcggcagttaagtctggcctcagactgctggggttcaaatcccaactctggtgcttccttgctgagccacactggacacattaatctttctgtacctcaatttccttatttttgatatggggatggtagcacgtaatagttaatttctgaggattaaatgaacagtgaacataaaatacttagcacagtgccgttacatagcaagtgcccagtaaacacgacttattgtcatctaattatttgctaattattttagatagaaagtaggccttgttgttccagttttatggatgagaaatctgccaaaacgtgtctcagccagtgccaggaattcagtggccgattaaggattcaaacccagggctgtttggttccaaagctcggctcatccccttgtgttttgttgccatttctgacttgcagctctagaaaccaggtgttggcctgcgtccaggtcttagagctcagagacttgaatttcaagacagacctggcctttcttttcatattcaaatactctgcttggttccgcattgccaagcttgtaaggagtcatgaggatcagcttctaatctgggagggctttgcaggaaatagaaatgtccaagggttgccatttattcaacagctggaagtacacagaccaggtggtggcactgaagtctcagcagccatttatacctggtttcagggacttgtctcttgggaggtgggcagttgagagaacaaagaaactcccaggaatgtattgcagtggatggagggtctggggtgggaacatgcctggccctatgtgggaggcggggagaggaggggctcctggcacctaggcctgggcagcaggaggctagggtaacctgttcctggcaggttccttgattacaggcatctgaggtggatacagattcttggagtcaaattctagagctagggagaggtggctgaccccaagccctcatcttaccaatggaaaaattagaccaggggcaaacagaggggtttgcatcatccaaactcctccttcatgccaggcactgagctagtctccttcccaacgtgctatctcgtagaaacctttactctgtgccctgaaatccccactttctaaatgcagactgtcttcataataagacatggatatctattatgctttgcctgattaaagagaagggagaagtattttctgctcttaataactctctgtgtctgtatctctctcattctgctccctgttgattattaagatagaaaattgaggaaatataggaaattgtaaagaataaaatgaaaattatctataaacccagtaataaccaaaaataatcgttgttaataatttggtatcattcattctcttttttcttattttttgatgaaaaaaagttcttgtctagaacagttttaaaagtaatgtatgctacaaagccttgagtgaacagcagtagcccttcccctctcattctctgcccccctgaggcaaccagactcagctccttttgctgctgtttccccctgcgtttaatactacatttccaaataaaataggcattctgctagtccttttctatttcatttggatatcatctatctactgagttctctggaagcttccttgtacgtcctcacttacaaaccttcccaagtttccttttgaagtcccctcatattgtgattacatctctttcctcatttccccagtcatagagataatacctgccttgctttattattttgttttccttaaagtgtttccaactccccctcaaaagtgttaatctcatctccttgtgtctgaattcttcagaatatctattggtttcattgttttctctccttgaatttacatgcctagaagcctccagcttcctagtttaatatcgcctgtgttctctttagatcccagacacatcacttgttttggaatttcctgctacctctctcctttttctaggtcccatgagttctttttttgtgtggggtttactttctcattctattagagcatggtatataggagcttcctgagaaaagttatatttgaaggtaaaaaataatttaaatatcttgcctagcagataatcattttatgttatccttacatttgattgacagtttggctggatataaagttctggtaggctataattttttctcagaattatttttttaattgacatggagtaactttccctccttttggtacacatatatagttttatgggtttagacaaatgtgtagaatcatatatccattactctagtacatacagaagagattcagccctccaaagaaattaacatctgggaaaaggaaaaagggtggaggggtacggtgaattaaagaataaaagattgatcagattattggaagagaaaccccatcatatcccacaacctgaataacatttgcattgtttcggatttttggtgattatgaataaatccactgtaaatgtcagcataccggtttttgtctcaatgcaagtttttatttcttttcagtaaatactaagatttctgagctgtacgataaatgtatatttgacttcataaggaactgtcaatctgtttttcaaaatggttgtaccattttgcatactcatgagcaataggtgaggattcaatttgttccacgtcctcacctgcagttagcattttttttcctttttcccctttgttttaaattttagctcccctaacaaaatgtgcagttgtgtcttattgtgattttaatttggattcccctaatgagtaatgatgttgaacatcttttcatattcttatttgctttctgtacatcttctttagtaatgtgtttgctcaaattttttgcccgtttaaaaaattgagctgttattaagctttgagagttctttatatatccaaatataagcattttgtcagatctgggatttttaatttttttttcccagcctatggcttgtctttttattctcttaccagtatcttttacagagcaaaatattttaatttcgatgaagtctaacatcagttttttacttttatggatgatgacactaagacgtgtcttatttaacaatttttagcctagtccaaggccacaaagattttttcctgtttttgattttatattttacatttaggtttatgttccattttgagtaaacttttacatatagtgagaggtataggtcaagggtcctcctttcttccccccgctccgtgtgaatgtctaattgttctggtactatttgttgaaaagcctgtcctttctccactgaattatctttctaactttgtcaatccctcagaatttcacagatgttggctgtgttgtcttctgatttcccttcacaatattgagaagtccagtgccattctgattccttatcttttatatgagacatatgtctgcttttatcttgtaaatgtttagtctttttttccttaaatgagatggggcctcgctttgtcatctagtgtggagtgcagagatgtgatcatagctcactgcatccttgagctcctgggctcaatcaatccatcctcctgcctcagccttctgagtagctgagactataggcacatgccccactttatttattttatttatttatttattttttcagagatggggggtctcgctatgttatccaggctgctctcaaattcttgggctcaggcgatcctcttgtctcagcctctcatagtgttggcatttacaagcatgaaccttcatgcttggccaagttttttttttttttcttttaatttcagtgttttgaggtttcataatgactttaggtttttttttaagttatactgcatgactatttggttactatttcaatttacaactttgttatcatcagttctagaaattattcttaaatcatttctttgataacatattctcagttttctctcgtatatttttttctttctttggcacggggtctcactgtgttgtccaggttggagtgtagtggtgcagccaaggctgactgcaacctctgcctcctgtgttcaagcaatcctcccacctcagcctcctgagtagctgggactacatacacatggctaaatttttaatatttttgtagagacacagttttttattgcccaggctgatctcaaactcctcggctcaaacaatcctcccacctctgtctcccgaagtactgagattacatgtgtgaggcaccaagcctggccttttttttttttttttttttaacaaatcctattagttggcttttggattacataagccaaaactcaattttcttgtttttttttctttgcttttccttcttcttcttctttttttttttttctttctgtattctggacaatatcctcaacttcatcttctaagccatctattgcaatttttatttatacttgtatagttttaacatctgatagttatcttggttcttggaatgatccttttttacagcatctttttcttggataaaatctcttctctctacattaaaaaatgctcttcaaaatgtctttttttttagcttttagtttcaggagtatgtgtgcaggtttgttatataggaagattcgtgttgtggggtttgattattttgttacccaggtcctaagctcagtacccaatagttaattttttctgatcccctccctcctctccctctccaccctcaagtaagccacagggcctgttgttcccctctttgtgtccatgtgttctcatcatttagctcccacttataagtgagaacatgtggtgtttggttttctgtttctgcattagtttgcttagaatacagctccatccatattcctgcaagacatgatctcattcatttttatggctacattgtattccatggtgtatatgtaccacattttcttcatccaatctagggcacttaggttgatttcatgtctttgctattgtgaatagtgctgccatgaacattcatgtgcatgtgtctttatggtagaatgatttatattcctttgggtgtatacccagtaatgggactgctgggtcgaatgatagttctctttttagctctttgaggaatcaccacattgttttccaaaatggctgaactaatttacactctcaccgacggtgtgcaagcattcccttttctctgcaaccttgccagcatctgttatttttttgacttttaataatagccattcttactggtgtgagatggtatctcattgtggtttttatttgcatcatttctctaatgatcagtgataatgagtttttcttcatgtgcttgttggatgcatgtatgtcttcttttgaagtgtctgttcatgtcctttgcccactttctaatgggattgtttttctctcataaatgtgtttaagttccttatagatgctggatattatactgttgtcagatgcatagtttgccaacattttctcgcattatgtaggttgtctgtttactctgttgatagtttattttgctgtgcagaagctgttaagtttaattagatcccatttctccatttttgcttttattgcaatcacttttggtatctttgtcatgaaatctttgctgttcctatgtacagaatgtccctatgcctaggttgtcttctagggtttttatagtttggggctttacatttaagtctttaattcatcttgagttgatttttgtatagggtataaggaaatggtccagtttcaatcttctatatatggctagccagttatcccagtaccatttattgaacagggagtcctttccccattgcttgtttttatcagccttgtcaaaatcagatggttgtaggtgtggggccttacttctgggctttctattacgtttcattggtctatagatctgttttggtacctataccgtgctgttttatttactgtagccctgtagtatggtttgaaggcagctaatatgatacctccagctttgttgtttttgcttagaattgccttcgctattcaggcccttttggttccatatgaatattaaaatagatttttctagttctgtgaagaacatcactggtagtttggtagattctgtaggttgctttgggcagtgtggccattttaatgatttaattcttcctatcatgagcatggagtgtttttccatttgtttgtttcatctctgatttattcgagcagtgtttcataattctcattgtagagatctttcacctccctggttagctgtattcctaggtattttattctttttgtggcaattgtgaatggtattgtgcttctgatttggcactcagcttggctgttgttggtgtatagaaatgctagtgattttcatacactgattttgtatcctgatttatatagatataaaatcatgttgtatgcaaacagggggagtttgacttcctatcttactatttggatgccctttatttcttcctcttggcttattgctttggccagggcttccaatgctatgttgaataggagtggtgagagagagcatccctgttgtgtactggttttaatgggaatgcttccagcttttccccattccatatgatgttggctgtgtgtttgtcatagatggctcttactattttgagatatgttctttgaatacgtagtgtattgaaagtttttaacatgaagcgatattgaattttattgaaagcctcgtctgcatctatagagataatcatgtggcttttgtctttagttctgtttgtgtgatgaatcacgtttattgatttgcacatgttgaaccaaccacttgcatccttgcaatgaagccaacttgatcatggtagattagtttgtgatgttttgctggatttggtttgcaagtattttgctgagaatttttgcattaatgttcttcaaggatattggcctgaagtttctttttttgttgtgtctctgccaggtttttgtatcaggatgatgttggcctcatggaatgagttggggaggagtctatcctcctcaattttttggaatagtttcggtaggaagggtaccagatcttcattgtacatctggtagtattcagctgtgaatccttctggtcctgggcttgttttgattggtagactatttattaccaattcaatttcagagctcattattggtctgttcgggaataaacttcttcctggttcagtctttggaaggtgtatatgtccacaaatgtgttcagctcttctaggttttctagtttgtgggcatagaggtgttcatggtagtttctaaggataatttttatttctgtggagtcaatggtaatatcccctctgtcatttctaattggatttatttggttctactctctcttcttgtttatttattagtctattttattaactttttcaaaaaaccaactcctggattcattgatcttttgaatgtttttcatgcctccatttccttcagttcagctctgattacaggcatgtgccacccacaaccagctaattttgtatttttagtagagatggggtttcaccatgttggtcaggctggttttgaactcctgacctcaggtgatccacccaccttggcctctcaaagtgctgggattgctggtgtgagccactgcgcctggccaatcatggccttctaacagtcccccaaagtcttatctcattccagcattaactcaatagtccaagtccagagttttgtctgagatgaggtgagtcccttccacctatgagcctgtaaaatcaaaagtaaattagttacttcccagatacagtggaggtacgggcattgggtaaatacacccattccaaatgggagatgttggccaaaacaaaggggctacaggccccatgcaaatctagaatcaggcagtaattaaatcttaaagctccaaaataatctactttgactccgtgtctcacatacaggtcatgctgatggaagagatgggtgcccatggccttgggcagcttggtccctatggctttgcatggtatagccccccttctggatgctttcatgggcttgtgtggagtgcctgtgatttttccaggcacatggtgcaagctgtcagtggatctaacattctggggtctggaggactgtggccctcttctcacagctccactaggtagtgccccagtggagattctgtatggagactctaaccccacatttcccttctgcactgtcctagcagaggttctctatgagggctccactactgcagcaaacttctacctggacatccaggtgtttccatatatcctttgaaatctaggtggaggtttccaagcctcaattcttaacttatgtgcaccctcaggctcaacaccacatggaagctgctagggcacaggacttgcaccctcttaagccatagcctgagctgtaccttggcccattttagccatgactggagtggctgggattcaggacacgaagttcctaggctgcccacagcaggggtccctgggcctggcccacaaagccatttttcttcctagtcctctgggggaggggctactgtgaaggtctttcacgtgccctggagacattttcccccttgtcttggtgattaacattcggctcctcattactaatgcaaatttctgcagcaggcttggatttctccccagaaaatgggtttttcttttctattgcattgtcagctgcaaattttagaaatttttattttctgcttcctcttgaatgctttgccacttagaaattttttctaccggataccctaaattatctctctcagtttcaaagttccatacatctctagggcaggggcaaaatgccaccagtctctttgctaaagcataacaaaagtcacgtttgctccacttcccaacaagttcctcatctccatctgagaccatctcaacctggacttcattgttcatatgactatcagcattctggtcaaagtaattcaacaagtctctaggatattctgcactttcccagattttcctgtcatcttctaaatcctccaaactgttccaatctctgcctgttacccagttccaaagtagcttccacatttttggacatccttatagcagcaccctactctactggtatcaaattactgtattagtccattctcacactgctgataaggacatacaagagactgggtaatttataaagcaaagatgtttagttgactcaccgttcagcatggctggggatgcctcaggaaacttataataatggcggaaggggaagcaaacatgtcctttttcaaatggtgacattaaggagaagtgccaagaaaaagggggccatctcctttaaaaccatcagatctcttgagaactcacacactattatgagaatggcagcatataggtaaccaccaccatgatttaattacctcccaccaggtccctcccatgacatgtggggattatgagaactacaattcacaatgagatttgggtggggacacagccaaaccacataagggcatttatagtgctatagatttccctcttaacactgccttagctgtatcccagagattctggtatgttgtatctttgttctcattagtttcaaacaacttcttgatgtctgccttaatttcttttttttatccaaaacttattcaggggcatattgtttaattttcatgaaattgcatggttttgagcaatgtttttagtgttgacttctatttttattgcactgtgatctaagagtgtgtttggaatgattgtggttcttttgcattttctgaggattgttttatgtcatattgtgttcacttttaaagtatgtgccatgtggtgatgagaagaatgtatattctgttgttttggggtagagagttctgtagaggtctatcagatccatctggtccaatgttgagttaaagtcctagataattttgttaattttctacctcaatgatctgtctgatactctcagtggggagtctcccactattattgtgtggaacttgaaatctccttgtaggtctctaagaacttagttcatgaatctaggtgctcctgtgttgggtgtgtatatatttagggttaggttaggtcttctttttgaattgaatcctttacaattatgtaatggccttccttgtcttttttgatctttggctggataaagtctgtgttgtctgaaatgagggttgcaacccctgctttttctaatttctatttgcttggtagattttcctcatccctttattttgagcttttgtgtgccattcattgcatgtgagatgggtctcttgaagattgcataccatttggtcttgcttttttatccagcttgctaccctgtgccttttaagtggaacatttagcccatttacattcaaagttaatactgatatgtgtgaatttgatcttgccattttgttgttagttggttatcatgccagcttgtttgtgtggttgctttatcgtgtcactgctctgcatatgaaactgataagaagagatactacatttgatcttagccaaaaggctgagaagcacttatcttttgttttctacctgcacttttcccctccctgtttgttttggtctcttctgttcatgttagagatttaactcaaatagtcatcatcattggctatccattcatatttaagagattggcactaaaattttgagtctatgtattgcatgggaggggctttgttcactgacaggtttgactatatggaaataagacagtaaactggatttttatggatgaacattggaatgttcacggctaaggccttttcctctccatctggtaaatttttccaaagataagccttctgcactcatgaaggcatgggaagtatgtgtaacctggctgtgggtactcagagctaattgggggatgctgtcttcactcagtatgttggtttcagtggatcacccgtggttttgcctggtgacttaccccctctcagctggccacagaatccttgaagctatatcctctctgcttgatatgttgtagtaactacattttcagtcttatgtaggtattgagaagggactggcatctggtcgcatggcagatgtcaaagggggttttgtgggtggttgtcttaacatttcttatacagattttcaggtaattttgttttcagccctaggtgttcctgccgttagaataatctggttgccccatttctgggtccttttggtactccatgggttaaattggttgtattctgctttcttacctgatggacatacgggcttcagttttcactgctctgcttaatcagttaccatttgtccaaccatttttcttcctccaaaatgtttgcatctctcaattgctgtcacttttttccccattctcttggtatatatgggtttgtttatgtctttttaattcctacactgtcattttggtgcatttggaagaaaatggaggttaatgcatgtgtttactttgtgatgtttaattgaaagttgaactcttctcaagtcgtttttctatatgtagattactatttatatacacacatgtgtatgcatatgctcatacgtttgctaaatgtatatatatattttacaaaattaggtgcaagctataagtcctgttacatggcttttttttctcatttagaattctatcattaacatttttatgtcattaaatattcttgaatgcttggacttttacatcaattaaattatatcatattgccatattattacttatttaattacgtccttacacttgggtgttgaaattgctttcagtctttcagtacagtaatactgtcgtgagatttttcacctaaatatttgttatgatttctcattatgtcttctagattgggattattcaattggtggtgtgggcattttaatgtgatatgtgattcatattgtgttatatgattcacaacttgataatgtgatacgtattatcaaattgctcctcagaaaatcattgagacaactggtagtccaagcatcaggtaattactcatttactatttgctaatattaggaattatcactgtttcaaaatcttagcttatttgataagaaatgacactgcatcctattgacctggtttttccttattatatagccaaatatattttatgttttgtcctctgtgaattatctgttcataaacatttttatattttccatatatgtatattataagcttttttatggagaaaggatattattctttacctggtacttacattttttcagtttttatttgctttcagaatttttgatgtctctgatgaatagttttaatttttatgttgtccattatagaaaactttatatcttcttttgcttttgaacttcaaaagttatttccctattcccaaatgagataaatattctcttgtatttttctagattttaatgatttgattttttattcttcttcatgttcaactctttatagttatgaattaattaattagctagttaattaatttttcattcaccatgtgaatagaatctaagtccattgttttttcaaatactatagttaatcagtattccagaaccatgaattaatagtttagcctttctcccctcattaaaagtggggctgttctcatcaaatgcattctcatatatggtctattgatgttctttcttcttcttgtcattagcctgtctgtttttatgtcagtacaacactcttttaattattgtggctttactaggtatttaattcttaataggacattctcttctagttacactttatgaaaaaaaacaaaacaaaacaaaagagagagagactctttgtgtctcctttcaaatgatctttagaattattttgccaagttccagaaaactcctcttgggttttattcgaattgaaaatattgctcaaattatttttgtgataatttccatcttgactttattgagtcttcagactcagaatcgttacctgtatcttcacattttcaaggattcttttatttccctcagtaaagttttgtgggtttcttcatctggacctctcatatctctgtttaagttgattcctagttatttgctaccatgggatttaatttatttcttgtcagagcttccaagtggttattgatgctatataagaaagctgttgtgttttatctatttgttttttaaccactcatcttactgaacttttttttttaatcagtactgcaagtttttgagttgatgcttgtgttttttttaggtattcaatcatatcatcaggaaaataatggtaattttatctcttgcttttctattattataaaaaatttctttctttctaacttcttccttctctttcttcccttttaattttattgcttagagtttgcaaatcaatattgaataatgtaagtataaccttgtttcattcctgaatttaatagaagtggcttcagtgtttgactcttatatatgatgttgtctttggcttcagatgggcgctgttattctaatagagtattcttctacatctaaaatactgactttttttgaggaggatgtgagtaataaactttttttttaatttcatttttacattttgtttattctaaaaaaaggaagaaatgggatacatgtgcacaatatgcaggtttgttacatgagtatatgtgtgccatggtggtttgctgtgcctattgacccatcctctaagttccctcccctcaccctgccacccctcaacaggccctggtgtgtgttattcccctctgtgtgtccatgtattctcagtgttcaactcccacttataagtgagaacatgcggtgtttggttttctgttcctctgttagtttgctgaggatgctggcttccagcttcatccatgtccctgcaaagcacatgatctcattcctttttatggctgcatagtattccatggtatatatttaccacattttctttatccggtctatcattgatggggatttgggttggctccatgtctttgctattgtaaatagtgctgcactaaacatacatgtgcatgtgtctttatagtagaatgatttgcgttcctctgggtatatacccagtaatgggattgctgggtcaaatggtatttctggctctagatccttgaggaattgccatactgttttcaacaatggttgttacattcctaccaacagtgtaaaatcatttacatttctccacagtctcactagcatctattgttttctgactttttaataatcaccattctgactggcatgagatggtatctcattatggttttgatttgcatttctttgatgatcagtgatgttgagctttttttcatgtttgttggctgcgtaaatgtcttcgtttgagaagtgtctgttcatatcctttgccactttttgatgggttgtttttttcttgtaaatatgtttaagttccttgtaacttgtggatattagatttttgtcagatgggtagattgcaaaaattttctcccattctgtaggttgcctgttcactctgatgctagtttcttttgctgtgcaggagctctttagtttagttagatctcattggtcaattttggcctttgttgcaattgcttttggcatttttgtcatgaagtctttgcccatgcctatgtcctgaatggtattgcctaggttttcttctgagatttttatggttttgggttttacatttaagtctttaatctatcttgagataatttttctataaggtataaggaagtggtccactttctgtttttgcatttggctaggcagttatcccagcaccatttacttaataggatgtcctttccccattgcttgtttttgtcaggtttgttgaagatcagatggttgtagatgtgtggtgttatttctgaggtctctattctgttccattggtctgtatatctgttttggtacaggtaccatgctgttttggttgctgtatccttgtagtatagtttaaagtcaagtagtttgatgcctccagctttgttttgtttgcttaggattgtcttggggtcttctttgattccatatgaaatttaaaactattttttctaattctgtgagtaatgtcaatggtagtttgatgggagcagtgttgaatctgtaaattactttgggcattatggccattttcacagtattgattcttcctatccatgaggatggaatgtttttccatttgtttgtgtcctcttatttcattgagaagtggtttgtagttctccttgaagagatctttcacatcccttgttagctgtattcctaggtgttttattatctttgtagcaattgtgaatgggagttcattcatgatttggctctctgcttgcctattgtcagtgtaaaggaatgcttgtgatatttgcacattgcttttgtatcccgagactttgctgaagttgcttatcagttcaaggagttttgtggctgagatggtggggttttctatacataaaatcatgttgtctgcaaacagagacaacttgacttcctgtcttcctattttaataccctttatttcttcctcttgcctggtaaccctggccagaacttccaatactgtgttgaataggagtggtgagaggaggcatccttgtctgtaccagttttcaaagggaatgcttccagcttttgcccgttcaataagatattggctgtgggtttgtcataaatagctcttatcattttgagatatgttccatcactaccaaggttattgagagtttttaacaagaagggatgttgaattttatcaaaggccttttctgtacctattgagataatcatgtggtttttgtctttggttctgtttatgtgatggattacatttattgatttgtgtatgttgaaccagccttgcatctcagggatgaagccaacttgatcatggtggatatgttttttgatgtgctgctggatttggtttgtcagtattttactgaggattttcacattgatgtttatcagggatattggcctgaagttttccttttttgttgtgtcttcctggttttggtatcaggatgatgttggcttcataaaatgagttagggaggagtccctccttttcaattgtttggaatagtttcagaaggaatggtaccagctcctgtttgcatttcaggtagagttcagctgtgaatctgtctactcctgagccttttttggttggtagcccattaattactgcctcaatttcagaacttgttattggtccattcagggttttgactttttcctggtttagtcttggttgagtgtatgcgtccaggaatttatcaatttcttctagattttctagtttatttacgtgaggtttttatagtattctctgatggcagtttgtatttctgtgggatcagtggtaatatcccctttatcattttttattgtgtttatttgattcttctttctcctcttctttattagtctaactagtgatatattttgttaattttttcgaaaaaccatcttctgcattgttgattatttggagatttttttatgtctctatctccttcaattcttctctgatcttagttatttgttgtcttctgctagcttttggattagtttgctcttgcctctctaggtattttaattgtgatgttaggatatcaatttgatatcttcctagcattctgatgtgggcatttagtgctataaatttccctcttaacactgctttagctgtgtcccagagattctggcatgctgtctccttgttctcattggtttcaaagaacttcttgatttctgccttaatttcattatttacccaggagtcattcaggagcaggttgttcaatttccatgtaattgtgtggttttcagtgagtttcttaatcctgagttctaatttgattgccctgtggtctgagagactgtttgttatcattttagttcttttgcatttcctagggagtgttttacttccaattatttggttgatttagcataagtgccatgtggcactgagaagaatgcatattctgttgattttggtgtagagaattctatagacgtctactaggtccacttgatccagagctgagttcaactcctgaatatccttgttaattttctgtctcattgatctgtctaatattgagagtgaggtattaaagtctcccaatattattgtgtgggaatctgagtctctttgtaggtctctaagattgtcttatgaatctgggtgctcctgtattgggtgcatatatatttagaatagttagctcttcttgttgaattgttccctttaccattatgtaatgcctttctttgtcttttttgatctttgtttaaagtcttttttatcagagattaggattgcaacccctgcttttttatttttttttatttttatttttattttgctttccatttgcctagattttcctccgtctcattattttgagcccatgtatgtctttgcatgtaagttgggtctcctgaatacagcacaccaatgcctcttgactccttatccattttgccagtctgtgtcttttaattggggcattcagctcatttacatttaaggttagtattgttatatgtgaatttgatcctgtcatcatgatgctatttggttattttgcacactagttgatgcagttcctccatagtttcattggtctttatattttagtatgtttttgcagtggctagtacctgtttttccattccacattcagtgcttctttcaggatctcttggatggcaggcctggtggtaacaaaatccctcagcatttgcttgtctgggaaggattttatatctcctttacttatcacgattagtttggctgcatatgaaattctgagttgaaaattcttttctttaagaatattgaatattggcccccaatctcttctggcctctggagtttctgcccagaggtccactgttagtctgatgggcttccctttgtaggtgacctggcctttctctctgtctgcccttaatagtttttccttcattttgaccttggagaatctgatgactgtgtgtcttggagttgatcttgttggagagtatcttaatggtttctttgcatttcctgaatttgtatgttggcctgccttgctaggttggggcagttctcctggataatatcctgaagtgtgttttccagcttgtttccactctccccatctctttctgctacttcagtcaattgtaggttcagtctttttatgaagccctgtatttcttggaggctttgttcattccttttccttcttttctcctctattcttgtctgcatatcttattttagtaaggtgatcttcaaactctgatatcctttcttccgcgtggtcagtttggctgttgatgcttgtgtatgcttcacaaagttctcgtgctgtgtttttcagctccatcaggtaatttatgttcctcagctccatcaggtaatttatgttcctctctaaactggttattctagttagcaattcctgtaaccttttatcaaggttcttagcttatttgcattgggttagaacttagtttttcattacccatcttctgaggcctacttctgtcaattcatctgtctgatcctccatccagttttatgcttgtgatggaacgacgttgcagtcgtttggaggaggagaggcactctggccttttgtgttttcagcatttttttgttgattctttctcatattcgtgagtttgtttagttttcgtttttgaggctgctgacccttgaatgggttttttttttgggtctttttgttgttgttgttgttgatgctgttgttgtcactttctgcttctttatttttatttcaatagtcaggtccctcttcattagggcttctgcagtttgctgggggttcactttaggacctagtcatctgatttgctcctgtgcctggagatgtcactcaaggaggctggggagcagcaaagatgggtgcctgctcgttcttctggggcctctgacctcgaggggcaccagactgatgccagtagggttgctcctgtatagggtatctgacaacccctgttggaggggctcacccagttgggtggcacggggatcaggacccatttaatgaaacactttgtcacttggtggagagggtgtgctttgctggggggaaacctacttgtctgggctgcctggattcctcagagctaccaggaagagagactaagtctgctggtccctagaaactgtggctgcccctcccgccggggctcaggtccagggggatccgaattctgtccttgagcctctagctggagttattggagtttctgcagggaagccctgcccaatgaggaaggataggtcagggttaggcctgaagaggcacgctggcctcagactgccacagccagtgtgttgggctgtggggacaaatcttgggatcaagccctccagcctccctggctccagcataaaatactgactttcttaaagccaaaaatattgaaaagattttaccaaaagcctcttccgcaacaatggattagagattgtttttctcacctcatcctgctgaaatcataacaaaaggcattttatattttcaaacagtctttcctttcctagaataagcatactgtccctgaatatacatatatttctttttcatatcacaatttaatttaattcagggagtattattgtgtacacattgataggtgagattgttctatagttttatgtttaatttcattttcaaagatctgttaaaccaaaaaaaaaaaaaaaaccaaacatgattaagatgtcaaataactcagaagggttcatgtttaaaaaccaccatatgctgtttggcttctctgcctttcagatcccgccctcacaggtcatccatttctatttttgcttctttggtggttatttctacatgtgtaagtagtttacttaaagtgcttttcttgacttattaacttaatatgttgtctactggctttctgctaagaaaaatgaggaattgcccttttaaatcactttctagcttctgttatagtaaatgtttactttttatgtctaccactggtaatctttgcaaattcagatgctatagtttacttcagcctctgcttcttgttctaggaaccatcagggtcttctgggtaaggtgaggaagacattgttgatctccccttctcccaatcacctctgtctttgacattgtcatccttgtttttacgctttcatggccaaggttggtaatttttaggcttttctccataacgattcttgcctttcatgattggttagtgtattagctcattttcacactgctgtaaagaacttccctgaggctaggtagttacaaaggaaagaggtttaattgactcaagttccacaggcttaacaggaagcatggcttggaggcctcaggaaacttacaatcatggcagaaggcgagggggaagcaggcaccttcttaccagggcggcatgagggagtgtgactgtgcaagaaaaaactgccacttttaaaaccatcacatctcatgagaattcactcactatcatgagaacagcatgggggaaacctccctctgatccagtcacctcccttcctcgacatgtggggattacaggtccctccttctacatgtagggattgcaattcaagatgagatttgggtggggatacagagccaaaccatatcagtcagtttaatgattctaaaagttgaaagtggatacatagctcttccattattcttactgtgtaaattgtttcattgcaaaaccaaaccgtgtgctaggatcatatttccttttctgctggactcgagcatatcttctctacctctcaaaggagaatgctcctacctttaaggttgaagggattctctcttttacttacaccccactacttacttttatcatagcatctgagctatcaacttctcttatttcatgagagatcttactcacttccagagccacctgtcctactgttccaatcttcactgaatattaatcatggctgtcgtctgagatgaggtggcttttcacagttagtattactggcttcagcccaagaaagaagacttttgtgtgtgtgccagctcccagcctgaaagtttcctccagactcatttttgtagatgttcataaccctgatattaaaatgaaatgaaaaaaagagaaaaaaaaagttttctgttcaaacaggactacattctcatataatttcccaagaaagagtaagtagtcttgtgtggctcaaaatgtctgggtctaatttatttgatagttttgctgggtatacaatttttgactaaagatcactcttaaaaatttgaagttatggtgacatttctccccaggatccaaagtggttgatgagaagccctgtcaactcagcctctctcttgccctgattgtttttgtgagcctaaacacttttaaaaatccacttatgatcatttcagagaggccctagaagacaaatatcagtgatcattttgctttttttgactgaaaatatttatttttgtacctttttaattttatcttaatatcaggcttggatgaacctcctaaggtgcgttaggaagcagatgacaacttctaagtttgacctggcagaaaaaatgtttccttgttgtgctgaagcaaatgttgtaaacttactttgctactggtttcctttgccatgtatcagaacctctgattttcaccatggtttgagctttgcctccatccttggtgttggcaatccctttagctttaaactcatctcttcagtcagtcatctgacaaacgctaagctccttcagctcagccctctaccacactctatcccccctaccccagtgctgtgtttgaacataagaggacacaattgaccaacataaataattcagtagatcccatactctttagcttctgcaaatgaacatgctatgtctgcttggtctttactaagatctaaatgaattcaggactaagcctttcaaaaacctactacaaaaacatcagtgaatagtataaactttaataaatattccttgtgtgagatggagaaagtatacctttcagaggaaacaactgaaaattaatatcagaccatctttttttcaatgttcattctcacctgtacccccattgcttttacttaactcttcatttttcttactcagcatttggtctagcttgttctatctcttttctctcttctgttgtacttttttcccctctgttatggaaggcaattaggttttgcttctgggttcttcccacaagcttgcgtgtttaaactaatgttggtgttcagcaaaataggggccttctgattgaaaaaaccttccttctgagaagtgaataaaaatatttcttctaacacatgaagtttatctgcaaggagaattcttatgaatgacatgcttgccatcaattataaccacagaattcttgtgtcacccacctcctgatgaaacatggcactaaagatggcagtcatgacatttgcttcctttataaaataaatggaatgtgctacgtgattcctaggactgatttaagtgctaacattttataatcctataaattagataactaagttcattactgcagagtaataacagctcattcattcataactacatttattgaaaacatattcttcatataaaatttgagagcttgcaaagcaatttacatatattatctaacttagtacttctaaaaaaattcatgagttcagtattataattattatcccaacttacttatggaaagtgtgactcagatatttgcgttaagatcactgacagaaactgaattacagaattcctcttgacaaatacgtaatagattgagcaaacaagaatacaagaaaagaaaaataaataaaattcaccacaacaccaaaacaagggaaagaaaactatcaaatgcaagttttaaacactggtaagtatggaaagaaacaggagacacagagtgatgtggagaggtatagctaggcttctaaatctttttccccacccaccaaaaagcatattagtaacatagtttggggattcctcaataccaaacatctagagaaaatcaagtttactgggtatcattatcctttctctcatatgattaagtaataagaaaaaatggcttggggccgggatgggggtataaacaaagcaaaggaagggggttatggaggaggttaactttctctaatggtagcaaaatcttcaggactgtcttctaaattgagtaagataaatgaaaatagggactaccttctcatcagaaaagtaaatacctgcaagtagatgtagtgaatctgagtatgggatattcacaaaatctaaaaagaagaaacagatgcccagtaatctaagaatgaccaaatatcaccttagatgagctctctccttccttctcactgtttcattaggctcagaaatcagacagaataaagaatactcaatcttcaaacttcaaggggaaaacaaacttccctgatatggtaggaagaaagtcaggtgtcacatatgctatatatcatagcaaatggcatgtcaggatggagccacccgagtggagtcacctaggcagaacaagaaggtaagaaatgtcatggcaacattaaagcataccacaaatactaattttgaaaaaaataaagggaggaagagaaaagaaacaaggaaggaaagaaggaaaagagggagggaggaagagaggaagggagggggcaaggaaggaaggaagaaaaaggaaggaagggatgcaagcaagcagggggctgtaatatacaagggcaaggattctaacctaaaaaaataacatttcagaaacagaggtaaattattcacaattgcttcattctatagaacaatttgatatgaacaccaggtcaataaagcgagggttcaggataatggaataaatggacagcatgagattaatagggacaaaaggaaacaaattgaggcccaaaatagcattaataggattaaagagcccataaataatgacagcaaaaagtgaaacaatacaaaaacaaaatagaatatacattgctggaaaaaacagtgtagagggaagtcttaacaagcacatgaatacagatgaaatagagtggtgaaagtagtcaactgaatatgaacataaagaaagctaaaggagaaagcaatttattctacaatagatacagacataaagatatatactctaaaggtataaacatataaccttttatttattcaaatataacaaaatatagcttagtataacaacaataacaaattattttggcgttgattatgcatgaaacatttatttagaggtttacatgaattaatttttcacaacaatttgaggttaatacaattagtattcccaatttatagatgaggaaattaagatatagttacgtaacttgcccaaggcaacatgtctagtatatataacagaattgggattcaaaagagtagaatgatgctattttgcctctggataaaaaaaaaatcctgaagcgaataaataactgaatgtgcaaatcaaaagagaatgtgttacaagcagctgaaccattttacctactcaccagcagtgtataaggattccagttgctccatatcctcccaaaaattgttactgttcatttttggactacaggattccatttataagtaatatctagagtacgcaaattcatagagatagaaagtagattagaggttaccagactggggcaggagagaatgaagagttattacttaatggttacaaaatttctctttggggtgatgaaaaagttttagaaataaataatggtgatggttccaaaatattgtgagagtaattaatgctgccgaattgtacacttaaaataattaaaatgctaaattttatgttacatattgtagtaaaataataataaagagacaatgtattccaggaaaatttggtacagaatgctagataccaagacataccctagttaaactattaaaacttaggataaatacagaattacccagtattctagacacaagaatatcctccacaaggagaaaaaaaaaagtcaagttgtcctcagacttctctacagcaggattcaatgtcaaagatgaaagaatggttatctaaaagatttgagggaaagaaagcatagttcaagaatataatagaatataaagctcacaagtcatggttgtcaagagtaaatgtactcaggcagtgtaatatccataagatcttgacaaaaatacttaattacaaaatacaactaattaaaagcaaacaaaaataaaagattcatgaatgcagacctcataacataaggattgatgataagtaatgaaaccatataaatataggactcacagtaagcaacttagacaattacagttatagatcagggtatgaaggttaaaacctgggcagtgtaacaacagcggccaccaacaattaaaactgagaaattgagagagggaggagaagttgaggggaagtgtgatagttctaataccatatttgacagcatggagtcattagataagcttaacatcaaaataaatagttaaaatatagtataattacttcaagctcttaatgctttcttcacaatctgtgttcttaaagagatctttgggtaagtatctcttggtaaagaagtatttgaaaggctagttttctttcaattttgttttaatttctttttcttctgctacatacaagtaaagacaaatacagtgttaaaaaaaaacttaaagtgacatatattttatcccacatttcatagtatttatttccacctattcttccgtccatccgcccatcctcatccatccatccgtctgtccttttgtctctgtgtatatcataagatatttaaaatgatgtttgccatatgttaatgacagttatttctgggtagtgaaacttaagattttttttaaacttcaatctttgtattttgcatttcttgaattcctcaaaatgaatatgtatcatttcccaataacaataaagtaatctttcttctttaaaaataaaaagggaaagcaaatatgttaagatgttcacagtggttgaagctagatggcagagttatgggtatttataattttattctttgtagctttctcaattttctgccacttttaatttattaaaatttaaagagcataaaaggaaaacaaatgaagtacaaaggggcttgttctaagttatatagtcagaaagtgattgtgcaatgatttaaacctaaatagaaggacaggaattaagacctggggcgggttggacgggcaaaggggagaggcagcgtcgaaagacttctatggtggaagtaatctagtttttccaccatgtggaagtgatctgattttccccttttgggtgggaacagtgtttcagttgctgggaaagttacttgcagtgaatctgatgcccacagtattgtaggaatcctaaatccacaggaatctggaaatccttccatccaacctgtacttgaacagatgaaggactatagacaccaggtattattttatacaatggtaagcttcagaactgcgtactgcttttaaggcaatctagtgcaatcctaaatgcaaactgagctttgtgttacgctgcatgaactaggagtctccaggtcctgaccagaccagtcccatagccgtggggtgagagctgattcagattcaatagatatttaattcaggcttcccttgtgtgtataagtgggccggggctttgacttgttctgtcttatgtaatcaccccaacatccaggtaggtcatcttctcctcgcactctcttattttattttattttattttttggttgatggagcctcactctgtcagccagactggagtgtggagtgcagtggcatgatctctgctcactgcaacctctgcctcctgggttcaagcgattcttctgcctcagcctccagagtagctgggactacaggtgcacgctgccacgcccagttaatttttttgtattttagtagcgatggggtttcactgtgttgcccaggctggttttgaactccagagctcaggcaatccacccacttcggcctcccaaagtgctaggattacaggcctgagccaccgcgcccggcccctactctattttattagtacaaatttaagtctaagcatgagggtaagtgacatttacagagtcacccagtgtagttgtagtggggttgaatcacggccccccagcattgtgcaaggtgtaattcctggaacttgtgactgtgaccttatgtagaaaaaagatctttgcagatgcagttgagttaaggatctcaagaggaggttatcctggatttagggtggatcctaaatccaatgatagctgcaaaagtgagagcaaagcagagggagatttgaaatgcgaggcatgaggagaagaccatgtgaaaacagaggcagagacgacctcagggagcaccagacaccaccacgggctgcaagaggcaaagaggaattatcccctagagacttcccccacggccctgccgacccaccttgatttcagacttctggcctccagaactgtgagagaatgaatctctgttatcctaaaccgccaagtttgtggtaatttgttccggcagccctagaaaagtcatacatccaattaggaaatggctggaaagggctccaagccagggtttctgtcttctggattggttatccctgctccatctcagtgcccttctcacccaaatgccagtgagtgaagagcagccatcctgatccgggagccacacctggcaggagtcacacctggcacctggagtcacacctggcgggacagggctgtgtgtcccttgcgtttgtttccggcagccctttctcctgtcctcagtctggctcactttccctgccaagcctcagagcaggtttggaggccttggagaggaaggagaattgggcagtgacgtgatgatggcaccaacatctcgtgcttgggcttttgattcaaccccctaactaatctccttgctgcagccacatcctctgtgacccaagtcacatattgcttgttgatgcacagctccctaagtgctctcctataccaaagggtcatgaagcccagaagccacgtttcccagattccttcacctgcagggtcccagtgagatcccactgatgagagatctgaaaggtcaaagaaccagagaacagtgagcctccctccggcagctgagagcccctgcaggggtgcgggcagtcagcagactttgaggtgtgcccatgtttgttgagcatctacccaacagtcacccaagtagccaaaactacagactcgacttttcctgtggtccttatacttagggatttcctgaggactaccttccccactgacattccccagcctcccagtagtggataaaggtctgagtctttgtatgaaaactatctacttgacgcatccagattagctcctgttttttagagggaaccttgacaaagacaactcatctcggtgaaatgaatattttattacgtcccatttcttctgataaacacccatgggctcctggtgcatggtcagctccttagcttgactatcaaggacttgctttggtcctcttcctgggcctccacatcccctctcaccagtcaggccaggacaccaaatgcctctgtgctgtcatagtcctggactttctcgtcctgttccctctgcctgaaatgatcgttccttctctacctggaatattcctgtgtgtttttaaagaaccaacgcaaatgtcccctcaaaaatgcccagacagagcaacttgcttccccagacccattgtcactgttggattctctgggattcagaatcagagatggagatgagtgtttattaggatgtttattggaaattgccccctggactagcagctatggaagggaaggaagggatgagcagcaggctgcgggaggaagtgagttgacgcagacctcaggacatcattagccaactccacggggagctaaaatggcccgtccgagtctgcaacgggcaggactggctgaggctttcaaccctagcctccatcagttgctggatgtgcagctctcagaaaggcagaccttgggagtacactctgcagctgacacagtccctggaggggctactgctaaagactgtgtgcctaagtgccctggcagctggggagacaagtttctttaaagagagacctgggcagggcatcaccagatgcaccatacccatttagagcaagatgtcttcaagaataaaatatttattctgtgtctctgcatgcttggtaccaagtacataaagcttgctcagtgaatgtttagcgggcacataattagtaaaagaatgaatgaatgagtgaacaaatgaatggatataagggagtggaagagattgaagcccgattaagcaggaatttcttcaaataatttctatacaagtagagaattttcgcccacacctgttgtctatgcttttggccctgggtcgtagtatatcaattttggtcaggacaagggaaaagtggggcatggcttaacccttggtgtaggtggtaaaaaaaataaccagaaaatcccaagaagtagataaagcattggatttatgtgtttgaaatgagacagtgccacagagagcacagggctcgggaactctttccaccatacacagagtccatggtggaaataaccttaagagactttgggaatcccaacctcttgcagtttcccttaaaaattcccatgagaacagcacaaaagcatcagatcatagcaacactggaaagtgagacaggtgaacttttgacagaatctgggagagttttccctcaactccaaggctaataggaatggtcggaaaaacagagctcagccacctatgccgtgccactaacaaaaggaagatgtgcatccatccttctctgtccctctagtagaagataaaggtctgtaccaatctaaatgggacagacatccctttacagcatgaagaggactttctgaagcacttaatgttctattgttttcctcccacctttcttttcacatcctgctcaaggctgaaactcacaaatacaacagggcaaaaattatcagagacattgtggcagcgcattgcatcttggaaggtgtcgttttcacaagtgcagtgctataggtgggctggaaggaatacttctgtggatggtggtttttcatgtacaccatctgttcatagtgtcagagaaccaggcagtgagtgacagagaggatccaacccctgtccttctgaatctcatcatagttaataataatggctaacattgattgagaatttagtatttgcctggtactaagtcagaggtcagcaaactacagcctatgcatggacccctcagctgcctgtttttgtaaagctttgttggaacacagcctcatccatccatccatttatccattgtctctgcagttgtcacaccccaacagtagaattgagtagttgttaacaaaaacttttcggcctgctaagcctaaaatattgactctctggccctttatggaaaaagtttgtcagcctttctactattacctgtattaattcagttaatcctcaagcttaactgaggatcctgtaaggtttgggttttttttttttttttttgagacagagtcttgctctgtcgccaggctggagtacagtggctcaatcttggctcactgcaacctccgcctcctgggttcaagtgattctcctgcctcagcctcccaggcagctgagattacaatcgtgcgccaccatgcacagctaatttttatatttttagtagagatggggtttcaccacgttggccaggatagtcttgatctcctgacctcatgatccacctgccttggactcccaaagtgctgggattacaggggtgagctaccgcacctggccaggtttgtctttttattatctccattttacagattgggaaacaaagacagagaaaaatctatgtaatttgcccagggatgcactttaggaaatgagagggctgggttttgactgcaggggtgtggctccagagcctgcatcttcattgctgtgctgtgctcctaagaacaaggctgtaagattaaaaaaaaaaaaaaaaatcttccctatattaggaattagggtgtgagatatacctatctacctgccttccaagtgtatattcaaaaagaggatttgacagatgagggacaaacatgctatccttgttcttttggcaaaagatgagaagcaccggtccacagtatttagaagggaataggtcgagactcaataaattgcatatgggcacgtgatctatactataaaagtgatgcagcatcagaaatgcacaggctcagaaaatacaccattcatagatccttcctggggaaataatcgttgcaaaggtacttcagagcctcgaaagatgagctaaaaatcaagaattttaaaaggggtaatcatggcatgaaaaactggcatgcattccctggggggcgtctacaggagccctattcaacttgtttcaaagctcttgaggagcattttcatctccgcaaactgtctctgatgaagtatcttcactgttttgttcacagctgtactcccggggcctacaacagtgcctggtgtggagcaggcactcaatatacatttgttgtgaaactaacctgcaacatcagtgaacaggcagccctgttgaaggggtgcttgctcctttcccattggaatttggatatagcttcaatgcagacaaggccactataaactgttatcccccattaagcctcttcttcaggaaaaatttactaaccacagtcacaaacccaagtaaatgccataactccttggaaagcactaacctatgccagcaaatgagactgtaaggaaatacctcaagacatgtgtggctgtctttccgtgaggacttgtcactcctcctttctacttttctgtttgtttccccatgtattgttttatagttaaaaagaatattttcccatgctccctctaaatatgatattccgtcatctctacagaaaccctcctaggactgccttagataactctttgggtgatgaacacagtagggctctagaaagcttattaggagttaaattctgttcccaccaaattcatatgttgatgtcttcactcccagtatctcaaaatgtgaccttatttggaagtagtcattctagatgtaattagctaagataaagccatattggagtagggtgtgctctgaattcgatgtgactggtgttttttccttaacaaatggagacagatgcacacagggataaaccatgtgaatctgaaggcagagataaggaggaggggtacatctacaacccaaggaatgccaaagatcgccagcaaaccaccagaagctaggggagggcatggaacagattctccctcactggcctcagaaagaaccaaccctgctgacaccttgatctcaggctttcagcctccaggactgtgagacgatcaacttctgttgtttcagccactcactttgtggtctttgttatggcggcttcagggaacccattcagctcattgcttccctggcagttgtcagcactagagctgcctctacttcctgattttgtcttgttctctttccatctgggtctaggttctactgcagggcttggtggaactgacagagacagtatctttggtggtctagagtgcagagaccacttgactggatgaggtggacagcagcaagaggaaggggaacccaagagatggttggggtctgcattgtggtcaagggggatagtccaaagtgcattttggtacaaaaagtgggacaggggaggagggctagggatggggaatgggagaaaggtaagactgaaataggaaactagctttgcagctgagaggatgggggcaggtggaggagtgagggatgaaaggggaagagtgggttcaggatgaaaaccgtagaaaatctaggggttcaggtgcttgatttcaagaggcctcagttgatggacatatcctagtggcttcaaggactcagagggtctgggagatgccttctgtgtcatttctgtgagtcgtcattatctcctggtgtccatttcctacctcctggcacaccagggcaactatggtgcctcagcaataaggaccgcactcccagctggccctcactggggtagggattggagtcctttccagaagtgcatgtgggaaggcagtttcaagagagacaatgtagggcagtggtcaagaacacaggctaggccaggcgcggtggttcacgcctgtaatcccagcactttgggaggctgaggcgggcagattgcctgaggtcaggagttctagaccaacctggccaacatggtgaaatgctgtctctactaaaaatacaaaaattagctgggtatgatggcacatgcctgtaattccagttacttgggaggcttaggcaggagaattgtttgaaccctggaggcgaaggttgcagtgagccgagatcatgccactgtactccatcctgggcaacagagcgagactccttctcaaaaaataaataaataataaataattaaaaaagcacaggctctggacccatgctacagtgctgtggaatctggtaacctgtcctgtcccttcttgggaaaagcagggaacatccagtggacaggaactggcatgatcgccaggttattgtggtctaccctgataggctgaggctcaggcaacctgtctggggaaaaaaagtggttctcaaacttgagtgggtgtcagcatcccctgggggacccagatgactgaccccactcagagtttctggtctagtcagtctagcttggggcccaaggatttactttttgaggggttccccatgacgttgatgtatctggctcagggccacacttggagaaccactggcaaagagagatgttccttgttgtcaacagcatggagatgttccatggcttcctggtgccttctaggcccgctgcctctgtggacagtgagactgggacctgccttaccctgctgaattccagggtcagttatctcactgttgtagtcgaagatctgcatgagggctcagaaatgccgcttctgccactgatgatcatggtagctaattctcaacatgtcaggtactattctaagcgtgtaacatacagacacatttaattcacgtaacaagcctaggaagcatgtacaacttttgccatcatcacctccatttttcagatggagaaactgaggcttatagatgttaagtatgttgcccaaggccacacagctgagagctgacagagctgggatttgatctggcagtttgagtcaacagtccatgcccttatctttcattgttccactgatcatgcaggagaagggaggcaagaaatgacccttgtaatgttggacaagttatctggcctctctttgccctcattcttacttcaaaaaaggaaatagcttttccaatcttagaagaaaaaaatacctttacgttaaaaaaataagctgtcaggattaattggataacagctgtcaaagtcttgtagctccttagaggatggtaaaataggaggaataattattgtgctattttctttgcagaccttagtacatttgggggagtcaataagtgtctaattatattcttggtaattagcagtgatggaaagaaaatggctcaggctgttggagttgggcagagggagagtcttcatgtttaatggccagtggccaagacctcctgcccctgagagaggtaggcagggcgtggcccagggtaggaggtagtttaacaagttagcacccctgtggtagcaccatttgttgattcgcccaaatttttgggcccctgccctatcagggctggggaattagagaccagctagtccagtggttatcaaagtgtggtccacagatcagtcccatcagcatcacttagaaacttgttagaagtgcagattcttggactccaccccaaatctactgggtatgggacccggcacagtttaacaagctttccaagtaattctgatgcacactgcgatttgggaaccgctgtttcagagggaaatgatactgatcttggagtcagatacacctcaatttgaatgctggctctatcaccctttggctgtgagactctgggcaaatcagggcacctctctgaatatcaagttccttatatataaactgaagggtgagaggttagagaggtggtctctaaggcacttgcattctgtctgcaatttcttttagcccccccacaaggcagaaactgtcttgttccttggctttgaaacaggctatttcatctgcatggaacattctttctgttcccttttcccctgtctgacacctacataacttagacctcagcctacagtttatttgctccagaaagttgtaggtgttttctttttatacttcttcccccaaatcaagtctgggttcttgccttgtcatagaactttccacattcctgtaatggctctttagaagtctgtaatctctaagaggataaaaactcttccatgctgactgctgttcccctagtgtcagacacatagtaggtgcacaaataatacttgtggttagaacaaattttattaacttgatgaaatgcttggctttggtggatttcataaggagactggtggaggggttagccttcatgaatggaaccaccttggggaaactgaggcatagaggtaccagtggagttagggatgcagtggcagagagaagccaggggagaaagccagctccagtagttgaggatttgaggggcgggtgctgtggaactgggggcgatctttagcagacctccatgggaccccttccacctggtatccgcgttagatggtgtgatacacgcaccttcagtgcttgcagcatgggctactagtgaagagcaaaataatgtgatggcatctgggcagcacacacggtaataagtcactcctagtatccccagggcaggcattttgcaaagctcagagtaactcttagcttctgtttattatttatttatatatttatcttggacagggttatggagctctttgagaaatagatggatgctctccccaggaagaaaaaaagagcacaaagacacaaacattccccactgtcgaccttgccactcactgggtatgtgaggaggttgctttcagacccagtcgtggtaagggagataaaagcctcaggtgaggggaagggtagacttaaatacttgatgtctctcccagccctggcattttaaagcttggcaataatagcgatgacccaatttagtaatgtgaaggcaagacggcaccattttaacaggattagtcatctcttctttttgctgtcttttctccccctttccatttgtgtcttttcccattgcaaatatacgaggtaataatccagtattttctatggagcatggcaaacatgctatatataagacacagttgaacattctgtgagtgtaattggagcataaatgtaactaatcaaaatattatcatgccaacggatgtgtgaagagtttggagatttaaaaatatatatattttagttccatgtcatttccatttagagctgcagaagcaagggactcagcccaatgaatgtcaagaacaatttggggtctgacaatgttcccagcagccctgttgttctctttactcttaatatggcagcagcttgacaactgacttaatttttgttcgttctttccattctttacccctcttcctgcatgaaccagctccccagcgcaaggccagctaactccagggagttgatgatcactccttgccatcaaacacaacgtgcccacatgtggtgtgcagcctagcagctaaatgagaattataacttcctaggtttgaatcctggctctgctaccagctgtgtggccttgaaaaagtcacttaagctctctgtttctcagttttcccaactgtaaaagaagaatgatagtagtcactacctcatagggttgatataagaattaaacaaatgaatcttaagtaaaacatgatggtatgtgttggctgttgttattgttaagaagaggagtgactgagaagataaataaattctcatgagaacacaaaaagtactgcatttctttgggaacaagacccaaggagaaagatctttccttcccaccccttcttcagagagagtctaggtagaaaatccaagccagcctgggctcctgacttaccactaactagtcaggtaaagtcgctgtaaagtcttggaaacagacttctgtagctggaaggaactttaaaacctctacctgtatatatacctgttttgcacgtgaagaaacagacagaattcttgcttacggggcagtgtgtggttaaaatgggtgcataggaagaggtgaagagtctgaagggagagtagcattatctgaccttcagtttcatctggactttgccaaatgaattgtctatttccaacatcaaagagcaaatcggtcaagaccttatgttttacagtttatgttgctgagttgtcattctgttgtgttttgggttccattgtttttcctacaataacatttagttttgctcctgggagattgaattgaattgttggggaaggcaagttatgaagtaataaagggagacgcaggtcccagtatgccctgcaacattgtcccggggtctgttttcatcacatcatcattggaaggaccagaagaagtatgctgggtaaaaagtctttattttcacttttgcttttgtttgggaggtcaggagggatgcaagcttgtgtaggggttgcatgtagtttacatgttagtctgctttgtctccataatcttttgcctcttctctccccctgctcagtaccccttccctcgcctgcagttcatgtctcctgcttctccttctgcctctttcccttgttccccttcctcccttcttcccttccatccatcctcttccccttttccctcctttcttcatcttagttttcattactcttttgttttctccttcttttctttcttcttccccttctccattccttctttgtcttgtgtctctccctcttcctctctgccttcctttttttctcagaaagtgtaaaagaatgcaggcggctagggatttggtctttgaggaaaagacccacgtgcacacaaactccctgcctgactctgcttgcattagggtatccagcaccggttagcagagcctctccaccagtgcgccttcaaatccaatcactgggggttaataccatatttaaacgacattatccacagctacatggattattagatagttgtttcttcaaaaattgccttaacaaatttgcatatgaaatgctgaaaccccaacttaccggtctgaatgaatggttacagaaatgcttattacttgttcacgcaaagtgacaaaatgttcacaatattcaattcctttgaagtttcaggatgtatcttttttttgttttaaataggtattatatatccattaagttccaattaacaccacctccccattttctggtatattagaaaagcagcagatttcttttttttgacacttgataattagattgctttcatagataataagaataatgttgaatgatatgtttattggtatggctattggtctattgttatgtttgcaattggcttgatgattactagttttcatggtaatactggtagcactatctgcttctcttgcacctacattttcttacttgaaagtgcattgtgccttttgatgtctttgtgccactttcacttttattatgactagatagctaaatttcatcattatggacttttaaattagatcctgtttaaaatacctataatggaagtatgcactctgaagtataggaacaacaattcagaagtgcctgtttcctggacattagtgaaagccatgcagggaaagtgatatttaagtagtttaatgaaggaccatggctgagctgggtggcgtggatttcaggaagggtatcacctgggcaaaagcctagcagcagggacatgcgtaggatgtttgaagtgtgtattagtttcctattgctgctgtaacaaattaccacaaatttagtggccgaaaccccacacattttaatctggacatcagaagtcctaagtgggtcacactggggtacattcaaggtatcagggctgcattcttttctggaggctctagggtagagtttgttttctcaccttttctagtttttttctggccacctgcagtttttggttcatggctccttctttcatctcaaagtaagcagcatagcctcctcagatagctcctcaactgtgattctgactctcctggcccccttgtctacctaaaggacccttgtgattacattgtgctcagctggaaaatccagaataatctccccatctcaagcttatctggttaataaccttaattccatctgaaccttaattctcttgccatgaaaggtaacatattacaggtttcaaatattaggatatggacatctttgggaggcccttattctgtctaccacaaagtggccgaggactgtgtttgcgggggagggtgggagagatagtcttcatataagaggcaggaggggtgggggtcaggatgtgtaaggctccacatattctcatgaaagaccttgggctttataggaagtggggaatttcctataaaggaagacctcaatggaagtcgagaacatgtcacggttggctttgtatctcagaaagatggtgctgagtactgttttattggatggtgagagaatcaaggactagactgcttaggaagtcgttgcaaaataaacagtttctgacacaaatgccatggacctgaattaggccagtgccaagggagtggaaaggaagaagatggtcagagaaacaaaaggaggaggcatccctggaccttgatgccttatcaattgtgggaggtggagacggggcagcagattttactctgcctctcagtggatttcttactattttcttcttcagtctattaaggtctccctgctacactgaaacaaaactttaggggtatgggaaagatagaaaagaagctgtttttgaggacctacatgcagcgatacttatctacgcactttataaatagtagttgtattaatcctcatggattacatgaggccacaatatgagatgtgttttatagccattttatagaagatggtacttgagagtcaaagagttaagtgacttgtttaagatcatcagagagaagagatgtatcttgggttccagtttatcccagggaccccttgttagaagcatcctacattgtccttgctcaccagggcttgggcctcaacaaacagttgttgaactgcctgtcaaagctgaggctgggaatgcccaacgtgtgtgcacatacttctcctaagtcatgtgacatgtagaatgcctaggacttctatgcttctgcttcctgaaggcaacatatgctcttttccctcttaaatagctatctgggaaaccacttctgtggctgtacagctcgggcaaggaacggcagagttgtctgcggtagaaactgaaatcggagtcggaaaatctgagtctaaatcttcattgtgttggttgaccttggccaagttacttgttccctactggagtttataaaatgagtaggttgggttagttaagttcctgtgactcacttggatgtaatttgttatgctttggtaagtaatccacaacttcaagaccagtgctatccaacagaaatttctgtgacaatggatgtattctacaccagcactgttcaatatggtatccaccagtcatgtatgtctactgggcacttgaaatgtggctagtatctctaagtaaatgatttttttctacttaattttaattattttaaataggcatatggcgttattagctactggttaggaaagtgcattcctagaccctgtagtctctgctttctaagaaggaataattggtttgagtatttatcactttctggctatgtggctttaagaaaatgactttacctctctgttccttcgtattccttgctttaaaacagagattgcatggcaccacctcattagggtgctaaacaatgcttagatcaatgcctggcacataataagttctcaataaacataaggttttataaacggcattgggctcactgttacctgctgttggctatctgttataaaattagcgtttattaagtaccgtttttacttaatattcactgaaaacaaacaactttgatctgtaggtttcattatcccattttatagatgagggcattgaggcccagggaattttactgacttgctcaaagtcacacaactaagaaatgccagaagctggagtgaaacccagtttacttaattgaagatccagaacttgtttcatgtcaccacagctgcttggcttttggcagcatttgaggccccaccagcatccattcccttcaagtaggtgctggcactgggagctggcggggccacctgtctgcagggaccatgctgagctcttggtgcccaaggccctcagctgccagtcgcccgagcacactcatgtaatcttaatgaacaatgtgcaaagccattaaaaactcaattaggactttctttttactgccgacgtgaggaaatgcaatcctgaggtgctcatgtgtaaacacaatagccaccatctgctatggagaagcattttgcctccaaaaaggagatctgtgttgcagacacatcaataacgaggcgcttatcaaggcattattatgcacgaaggggaaaaatgcaaaatttatggccagccagagagtacttcctggtttaattccacaattttcagtgctatgtataataactatgaggaaactaatgctgttttatgttccttatcacgttagtagattttttttttttaagggagaagggaaaagaatgtatttacagtctttctctttcttgtttctgactgatcttggcgtaatgaccggctcatttttgatctccaggaaactgacagccctgggatgatattaattatgccaacctgttgatcaaagcgggccccacagagctgatgatatacaagggttttcactcctgagcaatctctagtggcgcgcttgagctcaactcgcagataggctcccttcctttctggagggtgtggtcagacctatataaggtgggctacatgtggaaggggctagagatggccgctggatcccaccccccacccccaagaccttacactagcattgctggatgcttctgtgcctttgcctgggctattctatttcaaatgcctcccaagttaccaccaaggcttgctgctcttaatgatatccttaggtagcctgtcttgcaactttgcttagtagctactgtttcacatcttattgccttaaataaagggacttgtagctgaataatagtttattccctttttacttaaaatccaagatgagtgctcctaataggtgagtagccttctgtgtggttgtgctcattcagggaacctggcttcttttatggtgcactgccctctcctaggctcttgagctctgggacattcagctggtagatgggaaaatagaatgggccaatgattctcactgctttatgtacatgccgatcacctggggatcctgataaactgcagatccaaactcaataggcctgggggtggatgtgagattcttgtttctcacaagctcccaggtgatgctggggtggctggtccaaggaccagtctttgagaggcaagatcatttagtatggaggtgtgggggtgagagggaggcagcttttaccaaccaggcctggaaagtggcacacatcatactcatgccccattatctagaactcagttgcatgtccctaccaaatgctaaagggaggctggaagacatagtctagctgtgtgcccagaacaatgttacagggttgtgcatgaagctacatggaacagggcaatctctacctcctcagcgagcctgccctgctaccgaagctaggatggaaagaagtgggatcatgaactggtggaaggaaaaccttcccaactctctctacagtggattgtaaggagccaagggtacatgagcccgtggcgtgaattggcaggaggacaggagctgaaatgtgcatgcgggtatcatgggattcagagaggagagagacactttgcttctcaggctgctgcctctgctgggagatgtgctactcctcagtggcagaggcagtcacaaaccctttgtggggcttgtgagttgctacttacctgtccaaggaaaccttttggaaccctgtggcatgtaggccagtggacagatatgggcatggatgcaggctcggtctcatctctaagcctcaatttctgcccctataattgctcctttttagctgcccccttgcgagtttatgataattcaataacttctctgacatagagacattgctccacttaccttgtgttactgcacggccataaaactgggacgccttactcagaaacaccaggcaaagacacccgcacctttgttccacttccagtggctccttccccaggaggtgctacattttccgaaatcatgacttttgcggcaatatggatggaactagagacaataatcttaagtgaagtaactccaaaacagaaaatcaatacggcatgttctcacttataagtggtagctaaataatgcgtacacatggacgcagagtgtgaaatgatattcactggaggcttggaagagttggagggtgggatgggggtgagagatgagaaattacttaatggatacaatatacatcatttggttgctagtcaaactaaaagcccggactctgccactatgcaacatatccatgaaacacagctgcacttgtatcccttatatttacacacaagtttttctcattggtaggatggcgaaaacctgatagccactggttcaggtttctctgtgcttttcacctggctaccttttggtacaaacccacccaactatcctaagtggtcatcccagtaagacaactgtggccctagggatctgggcacagttggagggtgggtccatggccatccgcctgctctgcatggtggttcaggggaaacatgcagaaagtctaatttggccgtaagtccaagttactttgtgaataataacgtggaggttttgaactcctctctctctgtctctccctttctatctctctcatgtctgtttttaaattcactcagaacctgaaggagacagggtttgattggtaccttctagaatcccaagaagttatgggtttcccagcacttattaactgggagctgttagtctttttggtattagggtgaaagaatgaggtgacttttagctattgaagtagctcaacttggctgaggataagtggtcttaaggtttatttttgaattgaagattttagtggttttctaggtggaaactgtccttctagaatcaactgagtttatctgcagtgttccatgatgcagtttatttcatagaatcataagactctaagttcagccctcccagttgcttgtgaaatttccttaatcatctctttaatttgtctaggctctgttttgccacctgctttggtggggactcactttgtctctggccagtccattctattttgcaccaactttacttgttagaaagttatttgtacactgaactgaaatgtaccccctcatggtttctttcatgagtctgccctcccaggcagctttatcaataagctattgtcacaataaagctgcatgacacactgaaaagaaactcactggcaaacaacaataagcgtttattctagctctcatggaactgtgcattgattgtagattggctgatctaggttgggcttttgggccatgtggctgtgattccagctgcaggggtggcatggcttggttctttaagatcagttcaagtcaggtgtcctccatgtgtgtattcttgatcccaagctgaaaggggcagcagctactgggggcacatccttttcatgaaaggtagcagtagtgcaagacggcaagcccagcaaggcaagcacattttaacctttgcttgaatcattctgttagcatcctattgaccaaaacaagtcatatggtggagcccaaagtcaagggatggggacataccctctgtttctgctggaaggaactgcaaagccagtggcaagggacatggatccagggagggataaagaattggaaacaaccatttaatttgtcaaagcaactcaaaagaggctcacttcgtcctacaaggaaactttttgaatgcttggagatgttttctgcaaacagtaatagtagctatgttttctgcaaatagcaatagtagcacgttgtagaaatacttcatacatgttaccatctcttaattcttaaaaccaccttattgaatagattttttatacccaattacagaagaggatactcaggctcagagagatgtggcttttgcagggtcacccagacccttctagagtgacttgatctctggccactcctctggccaccatgtttatgggtgtgactgattttcagaaggattttcttactttctctttgtctctacttcccacctgctttgtgggtctccaggatctttcatgatggtgaacagctctgggagagcctctggccagaaggcccaccttctcctgccaaccctgaaggagaatgacacccactgcatcgacttccattactacttctccagccgtgacaggtccagcccaggggccttgaacgtctacgtgaaggtgaatggtggcccccaagggaaccctgtgtggaatgtgtccggggtcgtcactgagggctgggtgaaggcagagctcgccatcagcactttctggccacatttctatcaggtatggcattttaccatggttttatttttgaaaatttgtaataaatctatacacctttgctctccctacaggtgctaggtctagaaaggacttcatttattcactcgtgtttactgcgcttctcctcctagccaagctctgcagaggtgacctaacacagccgctgtcccacttgaattcatcatttgtaggaaaagactgatatgtagataaaataacaatgtaccaggatgcatgtggctcctgaagatgctagaggaacataggcattgattcctttttataaagtcagtgcttatgacatgatgagggaggtactagtactagcctattttatggatgaaaagattgaggttcggagagatgaaataactcgtaaaagatcaccctctggggaatggggtgtttgctggggaaggcaattaggatggtttgtaagaggagatgacatctaagatgaatcttgaagaatgaatacaaatttattttaaaagggagggagggaaaggcatttgagttgtcacagacagtgtgtacagtgagctgcaggggtggatgatagactatggcagagtttggaaagtctaagttgtttaaggtacattgcaaagaggacagacagggagatcagcctgcagggacaagcagatcatggggggctttgaatgtcaggctaatggatggaacttagtttaaagcagtgctgctcatactgtccatggtgaagggacacttcctctcaactcattgtggagcaatactcttataaaccatggtaaaaaaaaaaaatcatggcaatgacagattgttgcaacagttcctaaacctctctctctttccttccttatctccttgcgaaccgatgcacacagtgcacagattggcaccaatccataaagcatgcttagaggaacatttctccacattgtcttggcctggggccattgaaagttttgtttttttttttttaacaatgttattaaggtaaaatgtacatatcacagaatccacctattttaagtgtgcaatcccatgactttagaaaacctattgaattgtgcaaccatcattataaagcagtccagaacatgttcatcatcctagtaagatacactgtgctcatttgcagttaatctccacttgcactgttgaaaggttttaggttagagggtgaggcagtcagatctgcattttggagaaatttctctagcatctgaagcagaagatgaaccggtggctgggggcttcttagacattctccaagttaatatccatggtacagttcttccagattttagtgttaggaatacatgtatctattgagattgcttgttgggtttaccttaatgaggcaattcaagctttatttcccttttgccttggtaacgagaaatcagaatttaatactcaattaccctcaatatttagactggatttttgccatacatatttcaattttatcctcaatggcttgtgatttccttttagaataatgttatttttcttcatgatgcatttcctgaaactcctttcagaaataggggagaggtagtgatgatgatggtaatggtggtgatggtgatacctaccgttcattgggtgtttatcatgttccaggcacagtacaaaatgtttcacatacattaccttgtttaatcttcacaacaatcctttgaggcaggtactacgtacccattttataggtgatgaaacgaaggctcagaaatggtaagtgataacccaagcttgaacggaggtagtgccttgttttttacccgttttgtttgatttcactgtctaagctagtataatccagtataaatataatgggaaccacacatgtcatttataaacgtttagtagccacattaaaaagtaaaaggaaatcagtgaaattaattttagtaatacattttacttaaaccaacgtatccaaaatactatcacttggacatgtaatcaatctaaacaattattagtgagatgttttctgttctctccctgtcaatctttataattcagtctatattttacacttacagtaagtctcaatttaaatgttttattttcattagtaataatgatctgtatttggactcataaaatgtatagctgaagaagtggatacatatacacaagttgttccaaacattcttaagtgaattgggtatcagtttttaaattaaaatgtaaggtaactgaagttaagtaaaatgagaagttcagtttcctagtctcattagccacgcttcagtagctcgtggttgtcaaattagtacagatcataattcttaaccacttggctccacaatttcccctagtagagttcttgaaaggcttagccacgcctggaacttgtggatggggagatgaagcggggtaactccaaggctgggctctcagaagggacctggcctttatgaggtgctggttctgctcattctcatcctccattgctggagaatcccgcagctatctcttgtaatgccttggtctgtgttgagggttttcttaaggtttttattttggggttctttgtcaggagacttaaaggagtaaataatgagatataatggcaatgactgtcgaacagcacaggtgactcccgcaatcctggagatctgcaagcagcctgggagatggacctaagtagccttgtttgggaccacgtttcctttgcttttcccccagcctcatctccttggcctgcccatgggtgaccaagagccagaggcaggaagtaaggaaagttaggaagagagcagaaataaaagaggaagtgagaaagagaagaaaagagaaaaagagagagtaaattcttggaagaactcatcacaccatcattcagccactcgctccctattctcatctgcttgtcagtcattttgcatcctgcgtgagccaggccagttcaggcattggtaacgcagaggtgagtgggacagagctggccttggggtggtcagggtggactgttgtcatttggtgtgaggttaagcccctgttcccttctttacaacagcaggaacctatgaatgaaagtggctaaaagcagagtcctttgtttttaacacgtgtcactaacaacgtgacgtgttgtatcctagatgttttgagacaaattatatatctttggcctctttacttcggtgtcttttccttttgtgtaatatgttttagtacaaacctttatctgaaactgatggtgtcagatatgtgtcagaattcacaatgtttggaatttagtaatatattagtaatatattggcatatcttctgtattttataacaaccctggtaggctctgaggcagtaccctgtaatcaaatgtaatatttctacagcaaaacttacacacactcacaagaaatgggataaataaagactgtaagtagtatcaggccattcggctgtgttcaggttttaccaccaaattactttttataatactaaggtgaagaacgttgttttcagagcttttggggtttcagaattgcattaagcatatagccttatattctctacctgcacagttgcgtgaacaaggggatcagatcttgcttgtacattctgggaagaatacccagtgtatgatttgtagagtgtgctctgtggaacatgtgttccccgagattctctgtagtgaaggctgatgtggtggaggtcacagcattttgaaaaagctgtgtgatgtattcggttctaggagactcacagttacccacgtgggagttctgaggagtcagaaagaaatccatttattggtgtttaacctcctgtcttgcctctaagtttgatcttggccctctttttgttggatgaccacctgactatagagatagtattctgcagacaggtggccctacatctcagtttgctgggacaaccctggtttactcccattatcctggtgaaattaagagcatccatttcatagtgtgccccagtttcagtgataaattatatagtcttcctatccatagacatttacagaatgcatactggcacatgtggcttaggtttatcctcattttgtagataaggcaaacattttctgttaagggcagaaagaaaacatttttgtctttacaagccatacaatttctattgcaattactcaattctgccattgtaccatgaaagcagtcatagataatatgtaaatgaatggacccagctgtgttccaacaaaactttatgtgcaaaaacaggtggtgggctggatttggcttccaggccatagctgaaccctgatgtacatgataaagctgatgatgtccagagttgcatagtgaagtccaagaacacgtaacaaattattggcaaagctgagagcagatcccagataccctactccctagactgtcaccactgtatcattgactgtagacataaagtatctctaaaagctcatgggcacggtcagtgagcctttaaggtttcaattagaaaccccatatataggaccagacacaaatgggtacaggatggggccacaggttgaagtacaatgaacaagaaaattgactgagtacagggacagtcataccatttgccatgcttttggatgaggcatggggggaaaggacatttctggagtaccccctatgttcacaccctatgagaggcatgagatctgtgcagtagctccctctattaggtggcaacatgtcctatcttccagcgtaggaagcactactggtaaattcaagtccccatgatccatcccaggtcctctggctctaagctctgctttgcctttagggaaaatagcttgcactttctgagaatcttcttcctagttgtgtaatgttagctgtatcctgtcatcattcagaatcacagttccctcatctgtagaatggagaggatattaggtatgataggaccttctgcagatgaaattagagaacatatatgtatcatcatgtcaggtatattagtctgttctcatactgctataaagaacttcccaagactgggtaatttataaagaaaagaggtttaattgactcacacttccacatggctggggaggcctcaggaaacttacaatcatggcagaaagggaagcaggcacatcttacatggtggaaggcaagagagagcctgtgaaggaggaactgtcaaacacttataaaaccatcagatcttgtgataactcattcagtatcacaagaacagtatggggaaaaccacccccatgatccaatcacctcccaccacgttcgtctctcaacatgtagggattatggggattacaattcaagatgtgatttgggtggggacacagagccaaaccatgccatcaggcttgcagtgggcctcagtggaaggaagggaggaagggagggagggaaaaaggaaaagagggaaaaagagacaaaggggaaggaggaaggaagcctttttaaaagaaatagccagtgttgttaagcctgtactcagtaacctccatgccctcccttggataagtagcctcatctgggagaattttctgatttgcaccttattggctactacagcctcattgcatttccttggctgagagcagcagtttggagagagatgttatacacacaccgtcactaatggttactcacttggccacaaacactgcagagtgcccacatagggacaagcacccacaagactctcagattcaaaacatacttgcacatatacacataagtacagtggcaagaaaaggaggcctatcagaaaatccaatgacactagcaaaatgggttttaaaattcaccagacctggagctctggtcctgtacatatgattctatgggctaaatacaaattactgggcttcggagctgatggtttatgtattaatttattaaagtcgtattttatagttctaaaattgacttttagctctgtaataaacactgaaatttcctctttctcattagtgagctttctggcaccagacttttggcaaggccgggggtgagaacctgcctctgccagccatctcccgacatgtgccttttcttgggaaagcaggggcttgtttgtttatttacttttaattgacaaatattaattgtgtgtatttagagggtgtagtgtgatattttgatctatgcatgtgttatagaaagacttagtcaaactaatgaacatatccatcacctcaccaacttaactttttttgtatagtgagaacattaaaaaaatctattctttcagcaattttgaaatgcacaatatattattattaaatgtggtcaccactcagtgctgaatgactgttaagtcacgtgtacttcagatcacagctcctttctaggtgatgttaatttgatttcatattttctaatgattctgaattttctgtttcaagatttaaaaaaataaaagaacttctgttaattttgcagccatctgcttgccctagtctccatcacctgcctaggaaaaattacctttatttggtagttattatcgctatataggcccctgaaattaaggactcacccagctttggttcaactggactttaaactcagtccctttccctggaaaaccgtgctatgtggcactctgtagatttagtaaattcactcacaatgaagtggagtttatcacaatgaggggcccactctaccactcttggaattctattccatctgcttccttacccatcccacttctctccactaagcatcaaatcctcctccttgtcttatacaggtctccttgggctgatagggtaaaaaaagtctctcttaattttaccctaaacaatctctccccatgaaaacatgtatatttatgttctaagaggagttctgatgtgccaacatttttctcttctcctgaaaatgtttgcagccccttgaaatttttgccatgcagattttctgctcaagaactataaaagattaggttaaaacaccaggtctgttaaaccatggcctgacatatccacaccctcctccaagtatgaacaaaaaccattttttggaaggatgagcaagactcatctcagagcctcttgtggggaattgcttcctggctttgcacaagtagtcatgcacagggagaggttttcacctttccatgcaagcctcatctcttcaacacccgcaccaggaggtctctaatgaagcctatgggctggagcatgtgcaatagatggtaggtccacatggcagccttggagctgaagagcatctacagagacgttggaattctcagcctgggccctctgctccactccctgtactcagggtctcggcctccatttactgacttggagtgccactgggtatgcatggcctgcctcctgaagacatcccatccctactcccctgcctcctgaagacaggaggaaaacactgcaccagagtcacctctagacttctctactcactcccctggctctcccatttcctgactttgattcctcaagggccgtggttgaattttcttgagagtgtgcttgggtcagagataaccattctccctctcctcagaacaccttggcaggtctttccatctctgagggtccaggcatcaccttgtccccttgtggtgtctgtccctaaaaactggagctggctatctattgggtggggcttcctatggctaggagtctcacgtcagaagcatattgatggagtgatcatctccctccaaggttgtaggtgtcttctggggcaccttttgatcatactcagtgtcattttacacaattacattcatagattattaccatttttacttcctctttttgtgaattacctgttgaagtcatttgccactttttaatttgaatgatttgggtttttttttttgttgattctcaagagtcctttacacataaaaaaggatattttcatattagctgacataggtattacaaatattattctcaacctgtcatttgacttttaattttgttttagatttttgctaacatacaaagcacacttgacaccatagttattaagaaagcattgtgtaactttaaataaattggtttttaagacattgtcactaatttctagttgtagtgaatttggttagaaaatgtataggcccaaagctaaacaatttcttcttcgagggatttattgaagttatattgtagcctagtatatgatttttttgcaactgagccataagcctttgaatggaagtttcattctgtctttacatttattaacatgtatctaggaaatacattattatttacattatatatacttgctttttcctatacgattagtagtcaaagtctaagacatagattaaagtcttcaacccatgtctttttcatcattttcttcacttaagtcccttgactcatgtgttttttctaaatgaccattttagtccacctaattttttcattgttcttttcagttaaaattctacttcaaggttttcacactatttttgcaacaactgctttctgtttatttgcatttctttattatgtctttcttcaacttgttctttttaatgttgtgcagtcattctgttttaggtgtttatcttatagcatacaattcagagatgtatgacatgggaagatttgagaaatgctaataaggtagaataaaaaggaaaatgaagatgagggctgaggcagaagttgaggcccaatagacaccctggtctccagcttgggtgactgaatgggtcatagtgccacttaaccatattccgtatttcagaaagaatagactattggtcaatgagggaaaaggtttgaggaggaatctgtgcagatctgttggattcacgtcattgatgtggtacctaggtagaaatacagatctgtgacctggacacctaagacggatgtgtgggtgaaaggtctagggtgcagagctgggctttggagttatcagtgcattggcagctgttgaagggagagtgtatgcagtgaaaagatgactaacaggggcccacgttagaagggaagatggagaaggaggaatgcctacagacctcccaggcattgaacagtgccagatttatgagaaaaataacaagaataaagtgttatctgagcctaaatagaaaaaagacccagaaatggagagtctatgaacactgacagttgtagaagaatggtcaagttgtgataataattctagtaaatatttcttgagaatgtaccatgtgccatacattgttctaagtggggtcttaactcccttaatctaaaaaatcactcaatgaggtagacactataattaaagatgcagaaaatgaggcacagagcagtaacataacttttccaggactactaactagcaagtggcacagccagggcttgaacctaggcacttggaacaagagtttaagcactgtactatcttccttcttaaagtaagataaagattgaaaatatctacttgattaagcaattagaagattattagtatcttccgtgtaagcagttttaggggaagttccagatcatattaggttaaagttttgcagtggaaagtcaggaagtgttgggagtcaatgaagataaaactgctgagaattttaagtgttactgaaacacaactggatggtattagagaaaacctgctgctgaagggtagtttttaaagaataggagaagctgttgacatgtcaaaattagggataaaagggagggtttggagatatagggtagacagagaaaaccaaaaagaatccaaaagatggaaaatatagcaagagtccgggtcaagagcgctgatgttccttgcaaagaagaggcaggggatggtgtggatggatatcaagtcagtgggtaaaaagttagaagtcagcccctctttccctcttgcctcttgaagatgtgggtgtctgctgggattacatgggtgcatgttgaaagggcggcagttgtgtaaggtacaggattggagaaggcaaatgtgttataggctgggcaaagttgcaataaaggtgcaaaggaatgggggctttaggagagactcgtatggagtctgaggagctcacatggtagcctggaccttctgcattaataatccaaggattagataagaaaagcagaggtccaggctaccacgtgagcctgaggagcaggtcaagaggagtcaactgggatgagactgtcggtagagactgtgccggagtatgggaaaatggaatttccaatttccagaaggtgaaaaatgaggtgaaagtggggctaaagtggattgaagaaggccattggaaccagagagttcaaggatgttggccatgctatccacacagacattcatatctccttggtgaagatagaggttgagtgatgagggaagctaaatgcattacaaaatttttatggaaatagcagtttaggtggaagtcagttgccttctactcctggataccaacaggtagattgccacttatttttaagagtgttattatagattcaaatgtaatatgttccttggcaatgtagaatcaactcatggtaaaccctccttggcttatggtagcttccaaggtaggcatctatcttatccttcataagaaagttggaatattagaaagtagttctctgtagaagaatggtcaagttgtggcttgacccttgaagctgcaatgagaaagatgcagactggggtttccgagacctcggtgtttgggttgtttttcctgcatctaagtgttatttctgaaatttgttaaaaatattcttcttttgctagccaccaaagtgtggcctttttaccttgtgttgaaaatcccagtcaattgccagggtagcgtgctgtcttaacagaaggtttcttgggttgcttctgatgggaagttgaaacataaagggctgggggccgggcagcttcttgtgatgaatgcctgcaactgtttctgtgaaattgactcccgccctgtgtgttgcaggtgatatttgaatccgtctcattgaagggtcatcctggctacatcgccgtggacgaggtccgggtccttgctcatccatgcagtaagtctttcccttcctcccaacacagccttgatccatgccagactgggtagcatagagcctgcaatcccttccattcattcagcttacaaacatctctcactctctctttctctttgaatccttcagaaatgcttacatactcaatgcaatcagtcctgaataaatccataattttgccggcctgttcaacaggcagcacctccaggaatttgcagagagtggcaaaacatctttgtttgaatctctctccattattaagggagtctaaagtcctgattgtttattagtgggattcagaccactgaagtggtagaattagagggctttggatagaatcttgtgcaattgtcttaaaaaaaaaaaaacacaccaccaccaaaacactgagcaaattagcacactgttccctcacagggaaaagtaccctgaagttattaattcttttaaaataattttaaatatactcatcagctccatgtaggcatagagatttctcatagtggttagtacttatggtacagcgtcaagagtcctcaaaggcgtggcactcctccatacccatctacttctttgccatatttagtctcagatattggaatgtgtttcagcagggagatgtggtttctggatttactaaatctcagaggccataagtcctgggtacaggtagttgagatgacatcatacccagtgacatttggttggggggactgaaatcaaactgatttgcatggagattatggcagaccctgggagggatacctggaatgccagccccatgagtttgttagtgttctgcagattggagattcccagtagtttcttggcagccatccagttctaggtaaccccctgtgggctctctccactcctcccatatgggcatgagtcatgctttgggctatggtgcagtttgctgctgcctcaagagacatcatgggtcctcctctccttatgtgcttctcaatcctcgcatttagggactattctcatttcagcctcatccatgttgctttaattgaaataactctttccacttctgctgcaatgaatttgtcagaccctcaaatgtaacttccctccctctgcctggcactagaatgccgttgtctgactcattgtcttagagccccttctctggaggaatttggaacacattacaagttccgaacattattttgagaaattgtgtttggatcctgtgcaggagagaccctctttcccaagaagcaactggtatcttgggaatgctgagatgctactgggctcttctttgcactggctgaaagtccctaccctctgggttacttcctgaggcttttagaatttctcagatgggtctgtcattcagtcatgcctggggaaatgtttctattgacccagacttcatgtgaagaggatcccagaaatccccccagctatgcagggtttatgtagtagatatgcatatgaatctccttcactagggtgaaatattccccaccctggactcgtgggagtcaccatcagctgctcatttgagaatgagcctaagactgggcaactgtgttgggagatgtctgtgctacctgtggtccatttaattgcatgcgctcaatcttgcactacctccagtttcgaggtagtctctctgaaacatgccttctgtcttcctcattccctgcctacatcccatccactcagagcgtgcttgcctctgccacatctacctgtgttcctgcttcttactttgtgctggatgcttggactttagctttctagtaggtgacagctggcttttcccaagggaaaatagcatgagtctctctacctggatcccagaactttgtgctctaatgggaattttcatctccgtcctgatgcccaaccttgacacctgtctcttaccctagccgtaactaccttcaaggccagagtggtaaaagctctgccttacctccaagcactgaccatggtttgctgtcacaagcaaatgcatcctttttctttgataaatctccatgggagagggctctttggagggcactggaatgactttccaccccccaaagtctcatgaatccttttgaaattctcgtttcactggggttgctcctgaagtcaggattctcctgacaacctcatcctcctcctgcagaggggtgtgggtggcatggtcatgaaattgctgaaagccagttacccagcaaatggaccatgggatataactcaggaaggcgtgatcctggctttatgtctgcataatgtgctcctgttgggttcaacctcagtgttgaggcagcttaagcataaacttcccagaaagcatgatgtgaagaccccataggagtggctggaattggaaaaaatttcacttaactatatggacaaatactggcaatgtatataatgcctgaggtatatccacagctcacgaatcatgtggagttgagtagggcctagcaaagtccctttcctaaggaccagtgctcagtccatacctagcccaggtttttattctttctttcagcaagtaaattattgtacatcagctatgtgttaagaactttcctaggcacagtgatacttaagtgactaagaaaggttcggtccttgtactcatggtgtttgattagcagaagagccagtggaaagaaaggcactaaatcagtaactaatattaagtaaccagaaatttcagatagtgaaaataatagtggatatagtaagtgtcggtgtctgggatacgggagggctgcttggatatagtggtcagaggagatatctttgaaaatgtgacctgggctgggactcaaatcacaggagggagttcacagtctagtgatttggtggaggggtgcttcagacagaggagatagtggttgcagaggccctgcacacggagttggcttgatgctgccagcatgtcctgagcatacagggcacaggagaaggtggtcagggcaaatgttgggcaggaaagcctggactttgggcagcatcgtgagtagtttaaatgtttgtctaagggcagggaggctctgctgcagggagtgctgctggagaagggtcacttgggctgctctgtgttggaggaccatagagaagatgtcgggagacctaggaggaagaaagttctggagccatgcaagaggtggtggtggcccgcaccagggtgactgagagacatccattcatcatccaacaagtatttactgagcgtgagctccatgtcaggcaccattctgggtttgtgggagtgagaaagacagattgactgtctgtcttcatggacttctattgaagtgaaggaggctgaagcaaaacaaataaagtaattatatgattatattattataatctatatattatataattgtacaagcattatatagaagtatatattatataaatgtgagttatagtatataaataattatataatcatataatttacatttatatatcatatatacatttataattatataagcatatcatatataattatatgatatgcttatataattatatgatatgattatataattatatgcacagacagtgcgttagtttgctaaagctgctataacaaaacccctcagactggatggcttaagcaacttaaatgtattttattttctcacagttctggaggctggcagttcaaggtcaaggtgttggccaccgtagtttctcctgaggctctttctttgcttgcaggtggctgccttcttgctgaggcttcacatggtcattcctctgtacttacaatcctttggtgtctcccggtgcattcaaatgtcctcctctgttgagaatactggtcagattggattggattagggctttccctaaaggcctcattttaatttaatcatgtctttaaaggccctgctgctaaaaataggaacatttgagatactgggggttggggtcatatatcaaaagataaatctgggggagacacagttcagaccatgacaaattatgagcaggacaatgaagaaacttagagcatagaggtggatagaggtgcagagattagcgatccatttaggaggcagagccaactggtctcatttgataaattggattaagagtcaggcatcggagatagtgcactcacagatttgtagcttaagcaaggtggtgagagcctgggaagaactgagcaggctgcctggtgaggggccctgtgggccccagggactgcttacagggattacctgtcatgcaagtggatagtagcttctgaactctcctttagactaaaggtgcttttccccagcctccagtcttagaatttatgacttcactcatagatggttaaaaattgaactatattgaaatatatgcgttcaattcaaaaaagcctgtggacataaagtctttttaattatccctttctgtcctctaaaacatattttctattaacatatggtcagagtttatcaataagtgattccactaagtattccaaaagttccagggagcgagtgactgatttgcaattgtatcttcaattgattggcactgaaattagaactgtagataattgcctccaagctcccaaaacagtaaccaaaagacaggcataatactcaaagaaattattttctcttacaaacggaagcctctcatctatattttatagcccatttaacatttttgtgttattctaaaagtattctatccttagttaccctctgttgctgtttctcagtgttagccattagcagggccaaggcagttataactgtgtaagataaatgtcagtatgatttttccactccgtttcaaagtttctagcttctaagttgacttttctttctccctcacaatcttgtggggccgtgtccccgagcccacagagcatctgcaacatgtttctaatgtgcgtactgggctttctccacaattgtgtggcttcctactgagcactgtcaggtttaaagagcaagataaagggcacaataatatgtcttcagatgctgcactgacatctgtaggcgtctaaatgtcactaacgacaaggcatttttgccccaaatgcacagccagtcttctgttaagcccattcagtggcatcccatctggggggaattgggtctcagtgtggagtgagtaggaaatgcttagaaccacgagccgatggctgacctgggtaccaaggtcaaccatgtttggctgaagatgagtgatttgaagctcgtggaatataagttctctcccagagcagcagatgctgggggaaggtgacagttgagagagcttgcggctgatgagcaggccgtttgggggcatggaaaaaggagggtcagagaggccaggaacgcagggaagaggaccatacaggccccccacataagcacaatcaccagagagcactgcctgtcatgagccaaggatgacccagagccccaaggagcagagacaagggtcttgagcaagaagagggtagcctagatcagctcctgtgctgggaactgtactcggggttggccttcatgtgatgcccaccgcgtaccgcatggagtggtgggggcatccctgaatgtatggggctggatcgggtgagactggctagtggaaattgttgcagaggactttcataagagctacatatcagggaccgcagattgatagagcctgcatgtacacatgttttgttaagcctgtactgtgttttaataacatgttgagtttagagtgagagatttcatataaagtctggatttcttactggcctggagaaatcagacgtttgacacccctatacaaagcatgcatgcctggccttcctctgctgaatttaagtaggagctgccccctttcagtgtcccctttcagagtctctctccagttccctccagtcctcaccactccttattgtctcctcagtgctgaggctactggtggataccagttattgtgcttacaacattgcttttcttatataaagaaatctttatttttctcaagtctctatcaaaagtgggaaagtaaaagatggggcaaggaggtggtatttttgttttgttttacagctgaacgactttattaatttacataactggctcttgtaggtgcatgcgttcattatctctgctgtaaattgccagtatttccccagaatattcacactaggagccattaaacatctaaactctctaccactgaacctagaaggaagggaagaagaggaattgaagatgaaagaatcaaggcaaaaggtctgttgctgagaaggaagaagtggagaggagtcagaggcatgctggggacattgatccagaaaagattcattgctaattgtacatatcccagaggttaaaccattttctcgaagggtaagggaagagcatttctttgtaaaactaaacacagagtttcccagcattggagctaagactctgcactccctccccacctggggtggatgtgttcactccccctttaagcctgtggcatgaacaggcttccaaggttcactctattcccattttaagaattgatttgaactgatagttccaaaaataacttcataaaattatacaggagagccaaaaggaaacaatttcagacaatcagagcagcatggcatttgtcaagttgactagatgcaggaattttcaactctgaaaagcccatagaggtggttttccctgggccttgggtccttgacaccacaccagccatggtggctcaaaggtagcctgaggggtctctgagctgctgtcattagtttaaaaacctgagtaaaagtacattggggaaatggggatactgcccacttcctggattttttgggggtttcagtgagatatgacgtgtaaagtcctacaaacagtgtcagactcatcataagcgatcaatgaactcttcactgtgccaggccacttctcaagcaccaattccacgctgcccagtgctctcccaacaagtctgcctaattgttccaagattcttggcttttgctgagctttataggtgctgacacagattggtagacaaaatagttcaaatcaaggaaaaatagcatggaaaggggtcacttttaataaaatatttgggagcatggacagaaacctgaaccatcagcacagccctgactgggagccccttctgcagaccctggagtctatctggagacaccatcctcattcccagtgcccaggaggcaagggagcatagctgcttgttacatgctgagtttggggctaaagtggacctggattgaattttgtttctgtctttcactagcgctgtgtagctttcagcacattaaacttgctgagccttgatttctgcctaacagggaaatcataatagtgtctgctttataggaatgtcatgaagttaaattagatagagcatgcaaagcatttatcatagtacctggcattgtaggagctctcagtaaatgacattattgttactatttgtctctctgtgtatttgactccttgtagaaagatggccaaagcctcctgttaaacctccttgatcctctcctaaccctccatttgtttccattctgggggtgatcccagttcatcactgatttgattgatggcatagagatccttcattgtgcctcaatgaagaaaccaattcttctagatacaatttatcagccaatggagagctgttactgttgttattatttgtagagtgcaggtaggtgaggacccttctccacaaaaaaggaaagagatgaaaccaggttacccaatataaaacatagacttaatccgaagattgtctgctcatacacaccctgattttcatttgaaagaccctttccctgttatgtcctgtccctagaatcaacgctccccctcatgctcagaaagcaccatcacagagtaagactctggggtcttgtgatattgggcacgtttctagagttctctgtgcctcagttcattcactgtgtaatagagaaaataacactactgactgcattgggttaagtgagttactgcagagagacactgcatgtggtacttatcaaatggcaagcgctaagaatgacagctactagtgctttccttcccttttcctccctcttccgctctttgtcttcctcatcatcttcctcatcaacatcgtcacccaggccaagtgtgcaggtatcaggcccaaaggtgcttcacttcagctttcttattttgcttcttcaggctacagggaagcatcacctatggtgaatacacccctcctgccccccaatttttcttttaactttcagtgtcgtagtttcaccttttgtgcaatgccaaccccagaagcaatgatcagtttgggtgtattctaggcatgtttgtgccaatttcacagagcacagatctaaattcacgtcctggttccctccccctctggatatgtgtctgtgccaaatgatgacgtaaaccctcagagccttaattttctgatctgtgaaatggggatactgcccacttcatggatttctgtgaggtttcagtgagattctgcgtgtaaagttcgaacagtgccagacttataataagtgatcaatgaaatcttgactgagccgggctacttcttaagtgccagttccaccctgcccagtgcccatcctgagctgccatccaccaatagggaagtggtgcaggctgttgaatctcattctcttgtgttctttggtttctctcttaggaaaagcacctcattttctgcgactccaaaacgtggaggtgaatgtggggcagaatgccacatttcagtgcattgctggtgggaagtggtctcagcatgacaagctttggctccaggtaagcatgagagaagcctctgctcagactcgttaggatgagaaagggaaaagaaggactggaaggaagcagctctatggcaacacaagtgtattgaacaaagacatgcagagggggacaacagctagcaccggagcccacccttgcttacaaactggggtaattataggtccaggcgggagaggtctgggcttgtgagatggggtgggtggtgtggtcagtcgctggtaagtgaggagtttcctggggtcagatggttaggcctgggacttgtctggcgggatgtgtctcatggcccaaacccctgcggaattttctgctctaaccagcatttgcaaaatggtgtgagtttacgaaatggggcagcttgggctaacgatgctgtcttatcccttgataagggaagaaagtgtgtgctatgatgaatggtttggtgtgtacagggaagggagatttttaaagtacttctgttcctctgatggtgccctgcatctatgatcttgttaaatcttaactacgattctgctagtcaggcattggtataaccattttatacatgcagaaacccagaccaaaacctaaaagttccagaactagaatttgtaactatgaccttttccaactaccctctaacaaactttgtcttttaattgcagattactagggctgaggcaaatggaatagcttaggttcttggtacgtggttgtcatgtaatcttaactggaaggttcttggatatccagtgattcactggtacttctgggtaaaattagagagtcgctttttatgggaatttttcactaaaatgagcaatctgtctattctttggttaaataagtccgttagtaaagtccatcagggaagtgtttgaagcttgaatttgccttcctgttatttctgcttgttcatcccactttccaagaaagatgagaaaggatctctttgagtgggggttaggacagagggcgacacatagaactaaaacgtaacttgttataacattagcatacttccattaatactagcacaaatagcaagtttttggggcagcacagaagttggagccatgctgttcagtgcaggaaccactaactacatgtggctgtggtgatttgacatgaaaataattatttctatagaaaaattagctgggcgtggtggcgagtgcctgtaatcccagctacttgggaggctgaggcaggagaatcacttgaacccaggaggcggaggttgcagtgaactgagatcgcaccactgccctccagcctgggcaaccagattgaaactccttctcaaaaaattatttctaactagctttattgaggtataattgagatgtgatgtttaaagtatataatttgataagttttgtatgtttacatgtgaaactattaccacaatcaagatattgaatatttgcatggcgtccaaagttccgtccccatgtgtaatcacttccttctgacttccccactcccgtttgtcacaagcaaccgccaatctgctttctgacagtatgtattagcttatatgttctagaattttatataaatggaagcatgcggtatgtacccttctttcctacagaattattctaaggattacttatgttgttgtgtgtaacagtatttcttacttttgctaagaaatatttcatagaatggatatactactatttgtttatccatctacctgttgatggatacctgttgggttgttggcagtttctggctattacaaagaagttgctgggagcctgcatgtgtgagtcttcgtagagacgtattctttcatttctcttgggtatgaaagtgaattagaagtggaatggcagggtcatctggtagatatatgtttaactttaaagaacaacgagctgtttgaaaaaatggttgtaccattttacattcctaccagcagtctatgaaagttctagttgctccatatcctcaccagcactcagtatggtcagtctttttaattttagcatttcaataggtgtgtaatgggagcacgttatagttttaatttacatttcttagaggactgatgatactgaacatattttcatgtgttcctttgcctagctgtctctccacacactttcttggaagttcatgttgtcacttcttttcttgaatttaagccatttcctgtggttagaaaaatccttgggcataaagagcccatctagggaccaacagttcttccttgccacttagcagcaagcagagtgcaaatagcagcacagcagcgtgaaatacctgttctttctgcttcccagggttgcttacagaccacaggagagcataagaaacctccacgtcacctcagtattcggtagagttatttactcttttcattacgattagtgttcaagtgtattaggctgccaagaagctgtgtgatttcaatggcattgcctcagctgggtcatgagaatgaggcaggaccatcacaatattttcagcaactttgtttgggttttccaattattttatgatcgttattgtggcagttcttagttgcatgccctgaaccttgggtttgtcagtgggaggatgttaaagagatcataactgaatatttgaagaaaacagatggaaacacatgacatggagctcttccacatcttatctccttttcaatgtaaaccaaatcttatttcacaaaacgtcttccaggtggctttcaatgggacataaaacatgacaagatatcataaattaaaagtgggacaacaccagatagaaggagaaaatacacagagctggtaataatgcgaaaaccgcatttctgcacacgttactaactggtgggtcacacacagagcccgcagctttgtagccactagtggaataaaggaaacttgtcagatacacagttcacaatgtctgtgagataaacaaaaaccaattgctcaggaaaattctacctgttgttcacacagaagccagacaggaattgttcccaggagtccctgtgaagaaaacactgtatgatgcaatgaacaatgttccccaccacagtcttactgagggcacacaagtgagtttcacaggcctgtttcacatcatgatggctgtgagaaagcagtctggggaggagaagggggagagaggggtgaagtgggcaagaggctatggcagagtcccctgctctctgccaatctgtctccatcctggggcacttgaaacgtatctggtaagtgaatagattcagtaactattttttcaaggaaacttccctaaatattgtctgtctcatctgcatttcagaaaatattgggaggtacacagtttatatcgtgccatctgacaaatgcctgtgtggctagttaaatccaggcttatgtgcaatcaggtaattggaagtaggctgtattagtcagggttctccagagaagcagtgtgtgtgtgtgtgtgtgtgtgtgtgtgtgtgtgtgtgtgtgtgtgtataattttatatattttcatatataatatatagtatgttataatatatatcatgtaacataattatatgtaattatatgttatcctaagttatgtataattatatgttatacatataacaaattatgttattatatgttatataacatatataatatataaaaatatataattatatgtaatatatttatgtttaaaatatatgtatatataaatatataatctttatatagcactcattaaagaaaatatatattttataaaatatatattataaaaatttattaaatatattaaggaaaatatttatatgtaagtatatattaatatatatttgtgtatatatagtttttttaataagtgtttccttatagatgtaaacacttccatccatagtaagtcttttccttccatatataatatgtccttcctatatggaaggaaaggacttagtacaggaattggctcatgtgactgtggaaactgagaagtctcatgatctgccatctgcgagctggagatccaggaatggcagtggtgtaattctagtccaagttcaggagaagaccactgttccaactcaagcagtcagggaggaggcaaaggggcaaactcttcttcccctgcttttctgttctattcttccaaagattggatggtgcccattcacgctggggagggccatgcactttactgagtccactgattcaaatgctcatctcatccagacaccctcacagacacacccagacatactgtttaatttgggtactctgttacagtcaagttgactcataaaattaaccatcacataggttaacatctttctacaaaaagaaggcacctatcaacacacctgccaccccagagaggatcgcagccaccatccaagacaggccaaggcagtggccagtttctcctgagatgtttcttcagatgtgtccaagcagtagaggagtggctggcactctcgctgttgttctgcctcatataataaggttggggtgacttagcctgagaatttccaaagcaaatgaaacaggcccatcatggccaaaagagtctctataagacagctacagcaggtctactgtgtagcagtgctacttcctgctgtagcttctgagatatgctgaggaatttcactaagtcactgaaagtggtaacttctcaactcggccagttgtaattcagggaaataaagatgttgtttccagcatagcaggtatgtcggtggcccttctttctggcagtggttagaaaggagccagtggattcatagtttgagataaatccctgttgcctgtgtggtgaaatgctggccctcttttctgtagagtgggactttatagcttgcttttccttaagtggttttggatcataaattaataagttaaaaggaggaccagccaatgcccctgttttgcacccctctggaaactttatatgtctttagaagatcccatctgccggtgctggcttttgtggaattacagtacaagttctacatgagagtcaatggacaggaccgatgcagaaatgcaaacacatgagcctagaacaattgtagtgaatcagggaaaaggatgatagaaggctagtaaaaaattataagcaggttcttcttgtcctgggatcatttctccttgaggtgaagtgtatgatgccgtggtctgtggtggaaggggctcagtcataacttgcttattccttatgtgatactttggcctgaggaatccagacatgtaactttgcaagcaatttttcaagcaaggagatggtgtgcattccaaggggaatagccactaaacaaagtggtctacagttttgtggagtccatttaaaaaatgacattcaggatacaactaggtggggctataccaacataattataagtgtagcacagagcaaatataaatgtgtacatcttttctgcaagataattaggcagttgatatccaaagccttaaatatgcatatttttccaatgagtaaatttacttatggaaatttacctaaggaaatatctagagatggggacaaaaatgtatctgcaattgtgttcagtaggacaaaaggctggaaagaacctaaattttcagcaaaagagactgattaagtaaatgagggaatggtatcattaaatatcagattttagaagtatatttaacattttcataacatgtaagtgaaaaggatgagttatagagtcatataatattaagctttatgaaaaaatatatacacatatacatgctcatgtacataatatataaatatatataatctgtatatacatatgtatatacatagacactcctataactccatgaaatacatattaagacacttgattgtaataatagattatgaagctttttattttcatcgctattcttttctgttttatccaaatattctaagatgaatacaggaaactaacataaacaaaatgctattaaaaaaagaaaaatggtcactttttcccagttacagaatactcctagtatacgaagaagcctttgctgggtttggcatagctaattccaacagtgaggacacaggtttttcccacacccccatcatcaccatcagacactactcatccagaagcatgtttagaaatattttatgtgtgtcctcctgtctttatcaaggagcatggtggatggggctctttccttgaattactcagggactccagagcagagtctgtcagccccaccatggagctgactctcaggcctccctacaaaggattcaatccacgaggggtttttatgacaaataacatttgaagagtctcagaaatgaagccatgtgtccaaacgccctgtgcagatctctgtagggacagtgtatgttttcagacaaattgcattcactggactgggagcagatctgaatctcataggaaaaggttcctgcctgcactccagcagctgcaacagggttgatgagctgaggaggcatatcagtctttactgcagccggttcgcccagtaaacctgtttccttgctcctgcagggctgctgctggcctctgaggctgtgagtgttctggggaccagctcctcctcctacctacctgcctgcatctgaaccaggcatcccttctgtgtggcatttctgttgacaatctagtggtcacgctgcaactaagcaatgatgataatgtaatgatactatgtttaacagctgatgtttactaagtgcttacacataggatgtatttaattctcataaccagtctttcagttagatgtgattgtagccctgtttataggtgaggagactgagccttagatgggtagatgacatcctcggaattacacaggcagtgagcagcagaagcatggtgtgaagaaacataggtcctgtctctcagtcctgggctcattcttccatgcctacctcatggccctgtcaccttgggttacactccagcctttccttctatacaggaggctttctatttaaaaacagatttctttatttagcatatatttatacacttctaaatttattggccgctgaaccagatacttaagtatattttaatttctcaaatctacatgagatcaatgaaataaaatgcccttggaattatttttgaattgcctccccaccccctagttgccttcttaattctcttatccccttcctagccacattctttaaatgggacgtctacacttggaatgaggctttcttcagtgccacctcttccaaggagtggcccttgtaaatgtccccagtgctttcctcattgctatagccaaagggtgcatcgcaggccttatacttctcttttcagatttgatgatactgactgctccctccacaaaaatcttactgcccacttgaaactgtctatcaataactatgaaaggcctaagattttaccttatttggaggctcacaaggtagactgccacagtttcatagatgctggcagaagacatgaaacttctgggtcagagacaaagaactttgttattcaccacacagcaagcagcattaagtttcatgttctcattagtttcctttgtcccccaccaagccctgtgggacttatgccaggtccctcctgactctttgcaggagttctaaacccagaaatcaacccaaaatgagcagtcagccacgtacatagagggctcttggaagggtttcagcacagctaatcaaaaatgatttatgtctacttctatttcttctgacttttaataaagaataatcaaaagctattctttagagactgccaaaaaggtacaaatgtgatcttaagagaatcaatgggctagattttagcaagtttctaaatgtcatgccgtggcagcagggtgactagaagtgaaaagaatacgcattacaagtgaattgtgggaatttcacctaaatattttctggccaggaaattcctggagcagttggaacaaatgacagctggaaatgctgggcctaattttattttgttttatttttatatttttatctttatcatttttttttattattttgatgccaagaagttcaaaccaacacactgaaggcttccaggatcctgcattagaatatcttctgtaaaccaggcatagtatctgttgtgcaaaaccagaaatggtttccttttattaaagacagtactgtttccacttctgccaattacaagtcaatttcaaggcttcctgctctttctgaaataatgacagccatttttgtagtcttgtcttacctctttgtgaaggaaataatgtcatgacactaaaggagagtggatggggaattgcaaaatggcaaggccattacagaaaccttgatagataatcagacggtaggaaaacagcactctctgtggcatcaggtgcaactcttgccttcctctttaggtggttcctgaaaatagaggggtcttgcctgggggtggaaggatgcacttgtgctggggacagaacattaaagtgtagctattacagctcctgttcttccaatgagtgtgtgctctcaaaccaagccgacttatccacataaaacaaagtaagccaagggaagttggaatttgagttgtttttaaagagcaaggcaagcagttgaaaaaggggaaagaaaaagagagatttcaaaggcaacataatcagagaaacataaacataaaatgggattaagcagaaccaccgattaggctgtaaaatgcctttcttcaatttagaacatgtatccctcctgtacggatgaattggaagaaaaggggttcaccttctgggcagatgcagctccatagatatgtagcttgatatgcagatagagcccttgggcaaagcacaaaagtgacctccctccaagggggctcagtaaggactcatggctgtagtcagaactcctggctctgccaatagagtatgggttgggtttgggggccacaactcccgcctcttagctgggcactgttggtgcagtgaccagttgctcatcctcaggacatggtcttagatttaaggaatttttccattcatgtgttctgtggtattatttggccccttgctttccattaagggacttaagaggacatcagcttttaagtccttgagacccagggtaaagtcagcagaatttagcatcaccagggaaccaattagaaatgctaattatccagcctcaccccagacctcctaaattaccctctaggtgattctgatgcacattaaaatttaggaactactgttctagtctgaaagagtggggataaggaaacctcaccccaacctaatagtataccaggtatgccataacttaataatatattaaaagaatctgatggccaagaatataggaagatactctgttccttcttacatatatatttctgacctaaggtcttccaagatttccagaatgctaggcatctgggcttctatcacagcatttccaaaactgttttctgtgaagcagtcattttctgcaagttatcattagatattctttgaacaaacaaagtaagtttctggaacactgcactctctaccctcctttcacagagttgctaagtgtagctgtgtactgtttagtactaggtggcagatgggtgatgtgattaatgtctcagtgtctggtatcagatcacctgggtccaatcctaactcagcccctcagcaaagtgatatcaggttttgttcctcctagtaaggttcatggaccagcagcatcagcaagacctgaagaattccaatccccatcacaggccttctgaatcaagatgtgcatttttaacaagatccccaggtggtttgtatgctgtagtctgagaagtactactaaaagccatattgcttgaccgctctctgcctcagtttccttattcattaaataggaattactagtaggacttatctcacactttatcagacattggaatccccaggaaggtttgttaaaacaaaaatggcctggccccattcccaaagttcctgattcattaggtctgggaatttattagatggcgctagatatttcacttttttatttgttttatttttttttttttgagatggaatttctctcttattgcccaggctggagtgcagtggcacgatcttggctcacctcaacctccgcctcccgggttgaagcgattctccttcctcggcctcccgagcagctgggattacaggcatgcgccaccatgcccggctaattttgtatttttagtagagatggggtttctccatgttggtcaggctggtcttgaactccctacctcaggtggtccacctgcctgggcctcccaaagtgctgggattacaggcgtcagccaccgtgcctggcctgagaattcacatttttaacaatttcccaggggatgttagtgcagcctgtctggggaccatggttcgagaaccatagctctagatttttctaagagcatttctgtctccatgccagacctgttttcctccatgaagtatactatttcaatgctcgacttagtgtttatgttttactctttctactgtttttacaatcttaatccagcctataaattcctctgggcagaaattataccttccacactctttcattttctgttttgtaaaataatgagtacatcttcagcatgattaataatagaatggagaaaggggaaaaacctcagactatcaaccccagtaaacaacatctccaagtggatatcagccctagaattatcttacaaatttacatttctaacaagttcccagatgaggccgatgctgtagattcagggaccactctttgagaagaactttgacagggactttaagaggatcaagtgaacagtctattatgtaagccattaacacagtggctggcacaaagtcagccttcaaaactgttagttgatgtgacttttacttgataaacgctcagataaatcttgttaagttgaacaaaatgtttatcaagctcagctacggagtgatttatttatgtgagatggagtgacatttcataggaagcagtgcttaattacagctatgctcacacctggtattgccagtgtgctactgaggtcagttcccagccccatgtgtaaaaaaaaaaaaaaaaaaaaaaaaaaagcagatttagaaacagactgccagaaaatctcaaggcagtagctcattggatttcaggaaacccaacgtataatttactgtaggagaaggcagagacaggaaagtgccaagtggaatgcatgcttttagtgtcctggacagatcccctttgcaggcaagtgccctcaaccctagagcactgggcatgtcggctgctaaagcctcacagcttccttttcccagagagctgccctccgtcaagtaagaagtttcctcctctctctgcctcgtgagccctgaccaatgactgatggacacagtagttcaaccacaaggtaccatccactctggggtacacttcatgctccatgactccttgtgggaccaggctggagcttgactccagttgtgatctcatcctttcttagccccttttctcactctgtcctttatatcctttctcctgaaagcacttgataaatctccatgtgtcaaagtctgcttccagtgagcccaaccagagacaccacctgttggggcccactgggacatttgttgagttgactcgtggaatcagagggccagacgatgatttcactttagaacaacacacatattgacttgaaaatcttgccacagaaggaaaagaagcatgccctaaaagttcagaggaaggatatacttaaatctgaaaaactactgcaggaaccagaagaaaatttccgagaagccaagtggtagataagggccttatctgacggaatttttcctggacttctgtgtgcacacatccttgctatgcttctttgtggcatttcccaggactttgggctttccttcaatgtcttgctccatcttcctgacatcctaacatttgtatctctgtgcatttttatgctacctgatttctgggtttcaccgtattagccaggatgatctcaatctcctgacctcgtgatctgcccgcctcagcctcccaaagtgctgggattacaggcgtgagccaccacgcccagcccagtttcctcttatatatgacagcgataagaagtgtgcctaccttatttttcatggggaataaatgagaaagcatataaaacatttagcacatagtagtgtttagctgttattagcttaataaagaaaaaataaaagtgtttatgatgttataaataactcatattagaaaatattgagccaaagcctcaccactaactcattcttatcccccatggtggccctgaaatgccttgctcagcagtggggaagatgggctccttttgatgaccccctgcttccaaggccctcctattcattaagtgatctcttctccaaatcaggatacattcctggtgtttgccggaattttcccgcctttctccctgcactactttgggaatttccggggcattgcatgtggtgtctcctaggttctcatagtggggtccaagttgtgccatctcctgcaaagatgcctcaaggcatgaggaagctggatggcagtttccgcccaagtgacctttctccccttccattaccttgtactggtttttattcgggcaagcgaatggaaactttccagctcagaacagtgaaattgcctgctcaagtctgcatagcttggaagctgcagagctggcatttggcttcagattctcctcttacagccccatgcatgttgctctgatgtgtactaactattccacatgttggttagtttctggcatgagagggagttatggctgcctctcattctgccatggcttttgaacaataccatttttttttatgttcaagtataaagcaaatacgtgtttgagacagaaagtttgaagaatgtgaaaaagtaaaaagcagcagcaaaatattacctacaatctccctgtagcctggagcctgtagcctgtagcctggagcaagtctctcttagctgccctttgatgggggcctgggataccctgggtttctggccttcatgatcactgccttcccctggtattggtctcccctcatttgctgccatagagctgagcagtgtggctctacctgtacctgtgcccctctcctgacaggtcactgtagagggtgaggaaagatgacatagatgaaagtaggttatgcacatggggaaactgtttacttggtgcaggaaacaatgaagatcgcgttgcgagactgggagactcagggcatgagaatcataagtcataaggtttccctaagtccagataattaaaggagtcaatttcactttttggggaaaaacgttttcaaattaaagcaggcactgagaatatggtcttagtaaaaacagtgcttgacttgaagttggaaaacctggataaggggcttgtgtactctacacatttagttaaactgttagacatttggatttttcttctgagaagagcagcagttgtacactccccaaacaaggctgtgaagacacaatgaagatttatacaaaaatacccagctcaggggctggcacatagtagataaatatccagttaataacattaataaacatccactcaaactgcaccaacatgcatgtgccttaccagttctcataacctgcaactgtgaaagaggtttgttcaaactcaggatatccctcctgagattcaggatgctgaagacaaaagcccacgtgtattcaccttgattctagagatgtctaccaacttgggaagctttcagacaagcttctaaagatgaacagaggaaagtccttcagtgtaaaatgggcaacacttgtgggcaaatgtgtgtggaaagtttgtatcatacatagataagattccagagatggtgtgacagttgtgagaactgactagagatggctgtgagctgaacgtggctttttacggaagacggagtgtccccagggagaccagaccctccaggcagagaaaagagcatgtgccaaggaagagaggtgttggaaggctcccatcccctccctacctgtggtgatagcttagggcaggtggggctcagagcctgtggggtggggtagcagggcaccagccacagggcctgtgagccaggcggtgtttattctccatgggctgggttttcactaagtctgctgaagtttgtctgaaagaatgctatgagttctgcttaagggaaaaaggaaaatagggaggaaagttaaggggctacatgccagccccaaatgcaggctgagccaaagtgtttagaaggagcctttttcctctcttcttaccaccaggcctgtgtcctcaaatcagctcactagcaaagtttattcttgaatcagctcattagcacaaaccagccatgaaaactcctgcccttttttttttttttttttttttttaaagaggcagggccttcctctgtcacccagggtagagtgcagtggcttgatcatggctcactgcaaccttggtttttgggctcaggcgatcctccttcctcaccctccagagtatctgggactgaagatgagtgccaccatgcctggctattttttaaaatttcttgtagaggcaaggtcttgcttgctacctaggctggtctcaaactcctggcctcaaatgatcctcctgcctcagcccttgcaaagcactgggattacaggcatgagccactgtgcctggctggaaatcccttattatagtggaaagtcttgagccccaggggtgtgaggatgggtggatatccgtgttgggagtcacctagaagcctatgatgctatgattcctcctctccctctcttcctctgttctgcagcaatggaatggcagggacacggccctgatggtcacccgtgtggtcaaccacaggcgcttctcagccacagtcagtgtggcagacactgcccagcggagcgtcagcaagtaccgctgtgtgatccgctctgatggtgggtctggtgtgtccaactacgcggagctgatcgtgaaaggtgagtgcctccagcctgcgcctctactgccatggaaggttggcattaatgggccttaaagccccttttctcatctgctgatcctcccccacattcagtaaaagaggagattaatttctagtcactctggcctccctccccaacacaaactccccaaacgggagaaactatggtaaaatcatgcaacattgcattgctattccaacttgagtctcacatacaagagccatacgtgaaagactgtggaatatataacacagaagacatcttcaaatttggctttattttgtatttaaagttagaatgaacaaatgtccttgtatttgggtggcatgctgtggcagtgttctcgtactattgtttctgagggatttttttttaaaaattgaaaactcaatacaatgacaatattttggaaggacttttgaaatgaataattcctcaccccactggccttgattcaattcttttcaattttcttgttcttgttcaccttgagatactgtttacatgctttccattaaaatatgcagattgttttctgcttctctcaaaaagccagatatcccatttctttctgcaactttgtcatctttgttatgatgcttagtgatcgtatgctatctcatccaatgagttatcctattttgttaaacccccccatttgcagtcatttcgataattccaggtgtcttgtttttttctttcctttgtgtatgtaacaattagcacctccatggagttcttctggagagaacattttattctattgaaccagattatttccttaggataaattccctgggggtagagttgggaggccaagaatatgagcatctttatggatttttctttgtgttgcaatattgcttttgcaaaaaaaaaaaaatggtttgacagtttacactggtaactgcagtgtatggatgtactcattttaccaatgttatgtttgccgattaaaattttaatatagcataatttagtgaatgaaataatgaagcttttcttattatgctagctgtagaatgagacctggtgtgtttgaagggaaaaaacaaaaagcaaacaaaaaaaaccccactgatcgagcctttgaggcctcctaagttagtttcctttgtcaaagtatgggtgggtgtggaaactttgacctcattttgctgacccagtgtgactgggatccttgggccaactggactgggggttgcaggctgggattctctatgctggctgtcttgacttcatacagacattcacatggctgatcatgtgccatcattcaggtctcagctgaaatggcagtatgtcgtcttctcccagagaacttccctgaccccccgcccacacctcccttcctggtggtcacagttccttctcattacctggtctcctcttccacatagtttttatcacactttaaaatgctggtttgcctttatttgtttacttggtgactttttgtctccccttttaggatctaagctctgtgagaggagggctgtctgctgggttggaagtccctgcactcagcgcagtgcctggcactggttctcagtttgctaaaccatatgaagtgttagtgttcgcctgttttgacttgcacaatcagtcatttcacaaggctcaacttgaaaaaatgtgtggactgatagaagagtgaatgaattattggcctcagcaggagtttattatttcctcaccacaatgccatgaacacttaagccaaagatcaacaagttaggcacttatgaaaaaaaactttaaaaatctttaaatttgtttacattaaatgttattaacatagaaaagaagccaccactttgatggcattaagctcctatctttgctttgttgatgccataagattaatttgtgtggcccggtatggtggctcacgcctgtcatcccaacagtttgggaggccaaagcagacagatcgatcacctgaggccaggagttcgagaccagcctggccaacatggtgaaaccccgtctctactaaaaatacaaaaaatagctgggtgtggtggcatgcgcctgaggccaggagtttgagaccagcctggccaacatggtgaaaccccgtctctactaaaaatacaaaaaatagctgggtgtggtggctcgtgcctctagtcccagctgctcgggaggttgaggcaggagaatcgcttaaacccaggagacggaggttgtggtgagctgagatcatgccactgcaatccagcctgggcggctgagcgagactccatctcaaaaaaaaaattttttttgaagatttattattattatatttgtattatgtgacacaggggttattgcaggccattcaggttctcagtgaatgtgtattttcagatgtcctgctggaatgtgtcttataccttccgtggctggtctcccacaccagattgagagtcccaggagagggtgtgctgtgttcattcccgctcctcatggtcttgctagcaccttgcatgtacatggggcaaagttggtggcaaaagaatgtgaccagtggctatgggagttagtttagcactctgaaattcccatgagcagacaaatggaaccagaaaacgcttggtttattatttgcttatatgcccccattcaggggcaggatgggagctatgggaagagaaaccaagaggctactgggacagaggatgtggtggagcatccttgctttattcggagaggtggccagggtttacggggacactgatttgtcctctgctggttgtgcatcctgggcccaagtcaagaggaggggctggtgctagcctgggtgcagtagccaggcctggcaatatgactccgcagctaccactgctctgaagccactcacctgcagcccctgccactccagcttagggagggtggggtggtgggtggcacccagtctccttcacattgaacagtggggggttggcacttcctgtaatctggtcaatcaaggtgtaattttattacacatcgatgaaattcatccatatttttggcataggttatcagttttttagtgcccatttttcctccatttaaatattatgatggtggtaagctaggagcctggtcccttgcatgtaaagaagtcccttcaacatatgttacctgattttttcctaattgcagctctgtacattggttttattttaactcatttcatgagtgggagaattagcacagccaggttgagaaacaggaccatcccaaggggtacaactggagtccgacctgcatctggctcatgctgtttggtcacacctggagggctggtgggttgtggtcttgctgttacctggtgccacaatgtcatgagcagtgctgaaggggcccaggtaccaggcaagcaggattccctgggtccgtctagctaacttgccattttgacacgtgatattcccttcctgactgtcagctaacttccagattgctggagaaatacatttaacctaccctcaccccctgccccgaccccaaacacactgctaaagagttagtggcatccaagcaaaacaagaaaataaaaggcagggaccccctcaggagcagaagcaaccagaggaaacctgtcaccctggagtgggtgcccagggacccatttgaaggcagcaaacccaagcgtttggaagaaactgtgtgatgaagaatgactcacttacctctcaagagccctttgcctttgcggagccaggatgcttaagtactttaatactgaagtatttgtacttgtttaaaaaaatacaagggaaaagcattaatcctccttctttcagagaagggagaaaatctgaaaaacagaccaaaaaagaaaaaggattctcaagggccaagtgctgtgttatgggatgggatctggattccttcttggactgacatcacccacaaccctgggatatcacagaaagaaaaccatgtcttcaaggtcttcctcctcacaggttcccaccctttggttccagttcagggcaggagataactctgcagccaagatgcttgggtctgaattctggccccaccttgtcccaactctgtgaccttgaacatgatctaacctcttggggcctcagctggctcatctgggaacaggaatgtaggattacctccctcagaaggcgtcatgaggatgacatgtgataatggatgtaggagttcttagaacagtgccctgcataggcactctaaggtatttgttaaataaaataaataaattgcccataggggtgggatttatcagacaaagaagtaagagagatgaaggactccatgggtggggacaggacattggacccaggtgccgatttgatgactgtctctgtggctttggggaaatcatgtcaggcctgttctgtaaagtgtggcccagttctctgttggtacacggtgatgtgccgagtataagaagagggagggaggaaatatgaaagtgtggactgggggacatttgggtcatggggtcttttattagggttctctagagggacagaagtaataggatatatgtatatatgaaggggagtttattaaggagaactgactcacatgatcacagggtgaagacccagatgggccgtctgtaagttgaggagcaaggaagacagtagtggctcagttagagttccaaaacctgaaaagtaggaaagctcggcagtgtagcctttagtctgtggccaaaggcccgagagcccctgggaaaccactggtgtaagtccaagactccaaaagccaaagaagttgaggcctgatgttcgagggcagcataggaggaagacgaaggcaggaaaactcagcaagtccgcttctttcaccttcttctgccggctttttctagttacgctggcagctgatgggatggtgtccacccacattgtggttgggtctgcctctcccagtccgctgactcaaatatgaatctcttctggcaacacctagaaacacccagatacacccagaaacaatactttgcatccttcatttcaaccaagttaacacttaatattaaccatcacaagtccctgtaggtcagaattctctggtcctttcctgtgttcacccctactggatcgggaaagctgattcccgggtctggggacaaaggaaaagtagctagttttgtttgtgctcagccatctagttacatggaccacccctctcctggtattgttcattcaaaaccctaaccactccacagttgggaggtcactgggcccttcagcacccgagggttctgggagctgtaaacccctgtgctggcttccacagcaggtactcaggctgagaggaacagcagaggcccaggctggtctctctttctccccaaacaggcgtattcatggctgactggctcacagctcacgtgtgatcctgagatggtaaagattagcacttcagaagatgctgcctaatgtgagggtaggtaatatcaaattctcagggcgacacacagaccgaaatgaaagcaaattggaattacttaattctggggagctgtttattgagttgtgataatgtacctgggtatacattagattactctgtaattgaggtttcgctcaattgacaattcggcccctcaacctacctggtccagaccagtgctcagcaaatgcttattcatttgctttgcttctggttttctgagtgtcttcaatttcaaggtgtcttagctggcctcaaggacttgagtgtctgcaaccaaagttatgcagatgtatcttgatgaaaattttctaattcataaaaagtttcttgtcggtggtgatttttaaaccaatctttcaactccatttaacaacctattatgcactcagaacactcatcagtatgagaattagtgctcagaagaaatgtgatactagtgctgttagaggttccgatttaaacactgatgtgacttcctaccaagggaggttgttaggatcaagagtagggattattgttctaaatacacttgagtttccatcttagtcctgctccctggtacctgtgtgattcagcaaatcatgtatttactctgggcgtcattttccttatctgaataatggaggtgaatatatataaataggtcctatgagagggagaaaatataacatacatataatatataaaacacatatatatagcataatatatatgtaacatatataaacagatacatcctagtactagaaagtataaaattatgtctttagtagtaatcatattttttacattactattaaggaatgtttcccaaagacattgtccattgtttgttttcctggattaaaggaatgatattctgtacatactatgaaaatttaaatttagatcatcttaaggtctccctcttctgaaatgggattgaggtcatccaatccaatccattgtttgaagtcagttgcgaaagtgctttacttacattgtactgtcttctctttcctttttaagttttttttcagcatttacaagtttcttgagactgtatcaggcatagctacctggagcctacattttaggatggcaacagtgggctcctcagcgtccctgttttggaagcacacgttccaccgttgactgctgtcctggctggtcccgttttgctctctcactagtctggtgccagcagtgatttgcatttatagcctctagtttaaagatggaatgcctggagtagctgactcattcctgtattcatttgcttaataaaggtttatggagcccaactgtgtcaggttctgtaataagctcatggtctagcaggaagaatcatgcaaatctgtgctgcatggtcagttaatgttagccacctgccacactacctccctaatcctaacaatggccctatgacgtaggtgctgttagcaaccaccttttaccagtgagagcatggaaacccagagaggttctggacctttctaagatcatactgctcataagtggcagagctaggcttgccttgccttggccatgctgtctcttttataccacatttcttgcaaaatccagtatggtagaccctgcattcaggtgtgagctaaaggtgtacagaggttggaacaatgagcgcagtctggaagagtctgggatagcctctccgactggccccatctgagatgggtcctgtggcttggcaagctcataagcaggacagcctgggttagttttgagacactgagtgggtgacatgtttggggctggataagtaggcaaggggacatttgcagagtctttgtaccagaataggagcctgggcttcatcctgtagtagtctaggggctgtgacggaccctatccatggccatggatagtagtgtgcacactcataaggtgggatctctgcatccagctgttcttcctttctctggtcctgcagggaaaaaccattgtcagacagctggctatggtcactggcacagactgcgttggaaaagaagagtgaagataaaaggcacatggcgttgagacccctagaagcagactcagggcaggagttccgagtgcaaggtgcttatttggttttagggacatgagacagagaatcaagggcagcgaataaagggtacattctcaagtgagtaactgctgtgaccgtctggagctctatcctactaggtaattctgggattcagtgtagaacccctggggtgtggaggagggggttatttgtaccttaaccccctccagtcattggttgagagctgctcttgggggtcttaattttctggctttactgtcttgtcatacaggatgtaaccccccgctccccagggctttggcagaagcccatgtctattagctatttgacagttggcagaggcagttggaggttggactgcactcggtgcaataataagtcctgaggtggcggtgggacgcaacagcttctgctacagggatcctacagcctctgtggccttctaaggtgaccaaggctgctggctcctgcctccttggtggcagcagccatggaggacaagctcatgctaggaggagaggcaaagccaccttgagctctgtgcttgtatagggagtggaacaaagcaaaggctggcctcagactggactccagagtttccattcacgttctccacaagtcctcagaagtaaagaggagctggagggctatatcacccagtgatcagagagcaggcatggtatcagagagcctgggctaacatctggcctctgctctacctcctaagtttatctagagcctgccaccttccaccacctctattgtcaacatcctcgacaaggttggcagactttctctccagggcattagagtcaatagtttcagctttccaggtcatatgatctgtgtagcaaagactcaactctgctgttgtagcaaaaacagccataaaaaatatgcaaatgaatgagcatgggttatgtgccaataaaactttatttacagaaacaggcagagggctggatttggccacagtttgctgatcagtgcatgagtcaaaactctattctgttctcaactgcatgactattccagcttcctccctgctccactcttgccccattgatgtctattctcaatgcagcagcctgagtgatcatttgaaaaagttagataatggcttttttcctgttgaaaagcctccagaatttcctgtcacactcagaataaaatccaaacttcttaacatggtctccatatctagtccttgatttgtaatgccccacccccatatttgccctcttattctcttttctagccatgctgatccatttcctcttccttgaaccacaccaaactagttctgacctttgcacttgctgtccttgctttgcctgacatgcatttcttccagataattatgtagctcacttgttttatcgatctggtctctgctcagacttcagcttctcagagaggccccctctgattaccttatctgaaataacactctcccccacctcccaccccttccctttgtaactctgttcctttgcagggtgctttggttttcctcctagatcttgtcactatctgacattgtaatttacatctatttgtggattacccatctttcctactagaacatgagctcctggaggaagaagctttgtaagccttatttcctgctagaccagcagtacctgagtcagtacctggcatatagaaggggcttaaacatttgctgtatccagggaagagtgctcaggtccttactttacaagcatgtgacgagacccctcaccatcccttcttttttaaggttctcgttattgattgagctcctggttttccttctacctctgagaaagttctgtctcctttataggtatctgtttctttaccttttcctttaagtattacgtttccttaattcttttcttccttcttatgggagctgtgagctttgtaattccctgtgctcctcttatggtctttctttgctctgatttggctacaaatttagggggctcagttgccctgccagagccatgctacttacccaccccaccatgtgccccttagagtggtcattttaaaaactcctgggccttcttcaatgccttttcaaggaaggcttgcctcagtgtgagttctacccattcccccaagagccctgcatatggatcatatatgctccaacttaggtctggaagtttttttgtggtagacttagcttacctcctcctctcatctcatgcctgatcttgactttcctggaaccctatttcaaagcagagaaacctcaacatgctcatcttctgcgtgagtttcattctttgtaggaaaatatgctggtgctttggttcttattttttaatctttctttggtcttaacttttattaataatacttgcatcattttttttcccatgactgctattgtcaagaacacatagatagcaaatcagaggtctcgggttcaaatcctgattctgccttgtgttagctaagtggattaggaccatcatttcatgactgcctaattggaataataatgccggctcccctagatttgggtcagaggccatggctatgaaaattgttcctaaacaaagtgcgtgcctatgtttgtgcttctcctcatcattccccatcctcctcatgggtgcccggttccccacccttagcctctgactccttcactctttgataacgtcaccattagctttttatggaaagagaaaaatgacagatgggagaaaagtgggaaacttcacttgaacatatgtgtggaggggaggctaaccgggagatattatgtatattgtaatctatatgggcacaaagaccagcttatttttaaaaaagtgtaaatgtggataaataaaacctgataagtattggtttccttgaattattttgactactttatcagctgcatgctgatgtgttgcattaacacttttaacgcatttggaaattaaatcaaatggcaactgcattaaattctcattcacttggaacattaccctcctgtgttcaaatggaagaatgatctgaggtatggaacaagctgcaaagtctgtagttagctaccatttgtggaccatttattgcatgccagacacttcactgactgtcttctcatgaggttgtatttaatcttcaccatggtcccctgttaccactgaggatgctgaagtctgattacccagtctcatcagagtcacacagtccaaggcctgccctcttcctataatgagcccataaatgagactattttctgaccctccttatgctaattttccataatgtattattccgtgacagatatatatggaatattttttctgagaacccaagttccaggctaggctaaactcagttaaacccatgggctccagtttagtaagaatgctctagatcattgcctttgtccagtcactggagcctaatttatctctgaaacactgcagcctctgcctggaccagtgattcttaattgagggtgattttccttccaggggacatttggcaatgtctggagacattttggattgtcacgatgggagagggggggtactgacatctagtgggtggagcccagagatgctgttaaacaccctacgatacacagcatggccccctgacaacaaagaatgacccagctccaaaggccagtcgtactggcccagatcctgccccatgggaaggcttttgtacttagtgccctactattcatctaggacgccaggtgcagaaactggatgggaagatacttcctctgtgggcctctggccaatggagctgtatggatgggaaggcagagctggtgacgtggctgtgaagaagtggttccacttatttgagccccagaatccctttctggaaaattgacatatgtcttctggtttactctgactagtgatgcttggccttccctctgccatttccccactaactatccagggaaatacagcaaaaggtaaatgcagactgactccccatttccgagatctgagagaaattttctgctacctttcaggccaataaagctggccaagtgcccaccaagcacatgtgcctcccttccataggataaagtggtgaagcagctgcctaaccacggacctcattcccagcctgctctgcaatcactagggccctgtgataatagttccagtttaaggaatgtgagcagaactgctgcatgtcctttcagagtcaaagagttaaaaagcatgtagtcattcctcatctgctcacccccctctttggttagctggatgcagacaatttcaaggtgaggggagagtcaaaagattgaacacgcctgggtccctgaatcaccttgtggaggaaaattgtctgctaagcaggcctgttattaatattgaagtgataataaactattattgtgttaagctactaagccttggggtttatttgttacagcaattagtattttcctaattaatacaatttggatcaaaaaaagccattagaaacccccacaggcttaatgtcttgaatgaaaactttctagcctacctgaaaacagatgggaagatgtttcttcctttcccactgatattgggcttaaacgtccaaattctgtacgatctgaaagctgagcaattatctttttcttgtcacgtattgattgtttttgaagatttttttttaaagtctcctcccaaatgttctttcttgatgtagactttacaaattccagaatacatgagggcaaaaattgtgtgttctgtgttatgggaaggggttagagacagacttggctatggccacgaagcccaagaactacatgaactcaggtagagtctggccagatgtggcagcttggaagtctgatcctgaagggtaggtcttgcactaggagtcggaggactggtgatcctcctgtcaggcagggcctggtacatgaggtagggtgtccaggtgaacagtcccagccagcccagctggtcatgggaactgtccttgtacctggcctcacccagcttccagcccaagccagttggtccacctaccggcaacccagtgactccaaccgcaggtgggtgggtggagaaaaggaggtagagtaaaagattttgcagttcaaaaacaagcaccgccaatcatttagaaaggattctcatgaagaaatcgtcgcaacacattcaaacattgaaaaaacaaaacagtagcaattctcaggaagcagatgccgaaaacagccgtatctcaacagttggggtggctgtgggttcccaatgtaatcgatgaggttcagtatgctcacgttgtattgtttttaaacttcacccatgccccttgcacaacatgtgctcattttgatccagggagctcagaagccgtgcttagcggacatttacctaagaagagatgtggccttcattctcctgctaattagacttaagtgaccattgctcagggccttgacttgactatttgtcaaaataatgggttgtattctaaggccaggcttcacgcttattcccgccttaaaacaatggaattcctttctaaaatagtataaaaaacaaacgatgcagctctgcagaatcacaaggttcctagaatagaataaaatctctgctttcccacctcttgggcaggtagatttctttgcttctttaaagtttcttttttcccccctaacccatatgatccttctcctttttcatgctttcctaaacctggtagaaaaggaggctaggatttggcctcttctcttttaaaatgaaatgtgcttgcaccagcttttcattattaatcagagtagcatgcctgttgctttatatgtctatccaggggcagatgtgactcactttcaacccagtaaatggaaactgtgcctttttgatggaatgcggcctggtggtacggagcaggcagttattggcagagcagctgatcatctgttctcagtgagggaaagcctcctgtttgagttaatcagcggcaaaatgtgctctgtggtttgttcttttaatctcttctgcacgtgagtgaggaactgctgggaccccagcaagacagggctgcaatttgctgtgcctgagcaagcaattggaaaggcccttcgtaaggggaggtgaggaggctgcactttagaagcaggcaaacctggggttcattcttggctctgttcattttatgttgctgaatgcaactctgcatgtgactgagcctcagtttctccatctgtagaaagggacagaaggatgtttcttgcctcatgttttctgaggatcagtgaaataaagtgtggaaatcgcagagtgtgggacctgcttcataccagcaagaaagttcaaagactcgtgtgacaatgttacgttctctgtaccatttatttttccttctgggcacacaagcttcctccattcagatggggccagaggagtgtgtgcagaagtgatatacactccttttgggccagacctattaaaaaactcccctatgcaagccccctctctttttcccctcctgctgtgacatttgagaccacatattaagtcaggcagcagctccagatcggagcctgggtccctgaatgactatgtggagtacagcaccacctctcctcatccagtaacttcactgggctgtgatgggaatgagaaaaagctgaaccaactgtgacttgtccaacccgtgagggcggggcaggtggtgctactgcagggaggctctgtctgttaccctggcccttctcgccttgatggcttagaaacctcattctggccatctatgcagtggacagatacccacagcatgcagacaatgccatagtttccagtcagcattttgtgggagctgaacagtgatcagaagcaggtttgctgcgtctggtctcatagtaggcggagttagctgattctgtctacccacagtgctattgggattcaattgtctgaaaggcgctccttctccctgagcacatctgcactcatctctgtggcttttcttctatgactcacctctgtgagctgaccgccaccttttattcttcaatgtttgtcccaagttagggtaatatagttaattaagtgaccaaccaactttttcagatatatttgcatgcatctgctgaattccaggctctgttgcctttatttcttgacttctgagataagcagagatgaaggaaactacagggtaccctcctcccaggtcttaacccatatctagcagttattgacccgtatctagtacgtctaggtattgcctgtgcctatggcccttacctttaccaccccaactccaggctaccacctttctcaccctctcttatccaaccatgaccataagactcttggttgactactagtccatgatgtcatcaaggaattgccctactgtcttcagaaatcacagaaaaggccaggtgtggtggctcatgcctgtaatcccagcactttgggaagccgagtcaggtggatcacctgaggtgaggagttcgagaccagcctggccaacatggtgaaaccctatctctactaaaaatacaagaaattagccgggtgtggtggtggttgcctgtaatcccaactactcgggatactgaggcaggagaatcttttgaacctaagagccagaggttgcagtgagccaagatcgcgccactgcactccagtctgggcgacaagagcaagactccatctcaaaaaaaagaacagaaaagacagctcatggatatacccatagtgattgcttttgcacaaaagggctcatgccaggcattcctggggctacatctgagaagagttcacccagtcccaaatttatcaaccatgatgccaacagaagttaccatgacctttgagattgcagtatcattagctctctcttacctttgtgcctattcctaggggtttcttctatggtcacttctgacatatctgtttaccattccttctgactttcatcctcaattccctctcactccttacaccttctgtcctctctaaaccttccaaatttggaactcagctccccttaatattctttatcctttctccagcatgcacatgcacatgcacactctctctctcaagttctttggggtataatagacttctgaggatttagggtactggaaggggtttatagcatagaaatacaaatgtcctcaatgggatctgatgaatttctgcccttacaagtgcccttgccatcccaggaagaagttcttggtggcagctctggtctcctaccatgttgccctggctcctcccctctctctccttcctcggaggctcttagagcagtctgacagcagacagttgcctcaggacctgtttgcacagctcatttctgccagccccacttgccagttcttcccccactggctctggattaattccctctggcagatgcatgacttttccctgcctttcttttgcatctcggaagcagggctccatttcactgccaggatggattttgccattgcctcagtccttgacacctacctgggctgggacatcactgcgtatagtcctgctcttgtcctgccaaaactgtgcggtcattgacatagttaagggcaggaggactcggcaggggctgcacagagcaggaggatggagatgaggagccattctcagcctggaccctggcagtggtaagtggcagccacccaactctaactggataaaaccccagaggaaggttgttggcccacgtccctggaatgctctggcatggagctgtctctgtgcagatcacatcctagggctcaaatgaggacccagggctttgtctcctttgtcattttctgttttgtttgttcctcattggcactattatcctacatgctgatgggataagttgggggccatttgggggctggcatctccagatccacaccttgtagtttaacaacctcaagggcaaaaggattatgtctccccatgtctgaaggccagtcccagggaaggattctgcctatccctgacagggttgagcgtccgattctagacccaccatctgcccagtggcagatggaaggacccagtctaagtcatgtgcccaattctttagccagagtgtgtgaacccaggccctccaggaggatgcaaagtgagacaagagcccttccactcaataggaatgctgggcataccaaaataggacatgcataggtggggctcccactggcatgcacctccccactttctgtaatagagcaggaagggagttggccgcatgaagtgttagggctgattggtaggttgtggtgtgtagtttgtgtctcctgctttcaggcttaaataacaatgagaatgatctattaataccttaaatttttgttgtaatgaatttcacactgatggaaacccattttagaactaaatatgttcagaactaagttgtgttatctatgtctatttcagagtctcagtccctctcagcttctctttctgcctgtccctgtgcttccctgacttcctgtctaacacttccccatctttctttctcctctcctcagtgtccgccagcctctgccccttccctctctcttgcaaccattcctatgcattcaaaaggtcacaaacaggtaacttggctcaccactgccatgcttgtcagtgtctgctgctactgatagtccctcctgaaaaacagttcctcttcctcctacctcttcctcctctcttccccctaccacgtcctcctctcttcccctgttctcccttccttctcattccctgtaaatcctgcttttttttgtctctccctttcatttcttattaatgccttgttacacaccaatgttttgggtgacacctgtcttgtccactgccatggagctgttggccatggcttctgcagactctcaggtgcaggggtcgagcctgcacaaatgtgtggcattaacattttcctttgagtattctttgattgaggacagcaagcaattagtaccatttgccattttgtttttgttgttgttgttgttttgagacagggtctcactctgtcgcctaggctgtggcacaatcatggctcactgcagcttcaacctcccaggctcagcgatcctcccacctcagcctctttgagtagctgggactacaggtgccaccacagccagctaatttttatattctttggagagacaaggtttcatcatgttgcccaggctagtctcaaactcctgagctcaagcaatgtgcccacctcatcttcccaaaatgctgggattacaggcgtgagccactgtgcccagccccatttgccactttgttaaattagtatagaaatatacacctggacagtgccatcttagtctccaaatgccccctattagttgactgattaatgtgacaaatatttattaaatacctgttatgccccagtaatcttctagacacagggatacagcaaacagccatatggatcagggcttcgactattttgaagcagatattctaatggaggggagaagaaaaatgagctcataagtgagaccatttagagagtggtaagaatgtcattctttttttttttctaagacagagtctcactctgttgcccaggctgaagtgcagtggtacaatcttggctcactgcaacctccacctcccaggttcaagcaattctacctcagcctcccgagtagctgggattacaggcacctgccaccatgcctggctaatttttgtatttttagtagagactcagtttctccatgttggccaggctagtctcaaactcctgcccttaagtgatccactcacctcggcctcccaagtgctaggattacaggcatgagctaccatgcccagccaagaatgtcattcttaattctgtgaatagtgaatgctttgtggacgggaactaactgcttgtttataattttacggctcaaaagcaagtcacaggatgacttgtattcagatcccagctctggcacttgccacatggacccggggcatgcacctacacttctgtaagcctgtcataccctctacaaagtgagcacagtgaggtggacccttcaggtttgttgtgaggtatgagtgagatgatgtggccagaacaggagtcagcagctccctacccctcgggctaacaccagctacttcctggccctgtcctgcaaggtggggctaagtatatctgaatgcaattattgggttacttcaacttgccacccctaaggctgttgacccatccaaatttaatctgtacaattgtgaggtataatttactattgtattagtttgccagggctgccataatgaactactatacactgggtggctttagacaacagtatattctcttacagttctggagtcctgaagtccaaggtccaagtgtcagtagggttggttccttctgatagctctgagggagaatctgtttcatgcctttttttttttttggaggcagaatcttgctctatcacacaggctggagtgcaatggtgtgatcttggctcactgcaacctccgtctcccgggttcaagccattctccctgcctcagcctcccgagtagctgggattacagactcccaccaccatgcccggctaatttttgcatttttagtagagacggggtttagccatgttgaccaggctggtcttggactcctgacgtcaggtgatccgcccaccttggcctcccaaaatgctgggattacaggcgtgagccaccatgcccagcccatgcctcttctaacttctgctggttgccagtgatctttgggtgttccttggcttataaatgcatcattcctgtctctgcctctgtcgtcacatggccttcttctctctgtgtgtttctgcatccaaatgttcctcattttagaaggatgccagtcattgatttggggcccaccttcttccagtaggacttcatcttggcttgattacatctacaaagaccctatttccaaataaggccacattctcaggtaccaggggctaggtgttgaacatatctttctggttgatacaattgaatccgcagcacccatgtgtattggctttcatgaatttgaaatccccctcccaactccttttgggttattcttgtatgtttttgcttctgaagaattcagacgcctccttttatgcccatacagaggtctgcaccttcccaggtgtgagaagtgaccacagattcacagcagacaagagtgtgatgaggtctggctgagaggctgggggctggtcctttccttccctccttccatctctcctcatcttttagtttcttcctttgtcttactgtcaggccagagcctgcccccttcccctgccaaggccctattgcccacagaagggcataaattgtaccccgtgtctctctccagccatagtctctctccagccatagttctcaggaaccccttccatgaaccccctttcttgaccacacaaattctaattccccaatgccatcacccttgttatccaaggtgacttcttgaaactacacatgtatagcaaacatgccaagttcattaggttatgggttccacgaggacaggcactgggtctgtgcttgctcggcctgtgtccctggtgcttggcacattgtgggccctcagtggacatttgttgcataaatgaagcaactgcagggcttggatacttctctattacttgctgcttctttgcaaaggtggacaaagcccttcacgatatcttttccttcagaccttttcactgcacacgaggctggagaccagcccagatagttctagttagcctcagagcctttgcacatgctgctcctttcctttggaatacctttccctacttcatcaaccattttataattcagcccatgtattttccctgcagggaagtcttacctgaaactttccccaccattgtaaactatattacatgcccccaaatcaacagcaggaacctctgctagactataattgttcgaaggtaagggctgtgtccaactatctgtttattctcagtatccctgtgtataggaggagctcagttggtggcactcccatgaaatcaaatagttctttgatgtgtacaaaatgatgaggatgcctcaaatatcccaaaattattatgattcttattttctaggtgaggaatcagagacttagagaggcttagtgacctctctacattaagacctaaggttaaggacagacaactagagtaaagttgagggccgagtggctgcaagttctcctggggttagcacagagtcaggcacacaacggagcaaatgctagggtatgggcgacccacagagaggcacgagaagccccagagcagggctggctcccagccatgtccttgggagactgtaggcatcaggagctgcagccactgccttccttgcgattcttgggagacttctgttctaattgctcttttcaagtgtcgtgcgtgcagttcaatgtgtgggggacatagtgtttgtagcaactgctaatgacagggctactgaaaaagactatttttggagttaagcttcagcctaaaagaaataaaaataaacactgagtttttttttttaaagaaaaatatgtagaaaggaatcaattccatctcaaaatgttctttctcctagtgagggtggagtaatctagaattagagtaaggcaatctgggtttaagtcatggttctgccatgaactcagttttccgtgggatgccttttcctccaattcctcctggtcctaaggacagctcaggggtcaagcctgacctggctgaagccgtttccctctcctctagtcacatttggctccatcacagttcttacagtcagtcttgaccttgaccaagcaatagaggttaagctttcccagggccattcccaagtagcaaccctccaaactgtgtctcatccaacccaaccttatctgagcttcaatgaatcatcagcaaagcctgttactaatagtgatagtaatacacatgttgataataactaacattttctgagagatgactatatcccaattccttattgagcacttctggaacactgtgtggtttttctgcaaagattcactcttcatgatccctccccatgggcagagtacacttcctgattggctttgacaaagccccattgaccttgagcttggccatgtggcttggtttgaaccgtagaatgtgggcagaagggatggtgtgccagttcccaggagagatttcaggaggtatcatgtgtccctgcttgctctgttgcctgctgccatccgtcactggaagaacctgcccctggcagcaacagctccttcagactagttcctggaatgagaggcatagggaatagattcaaacacagcctggagctaactgagaacaagaaacaagtatctgcgtacatcaagattcggggttgtttgtcactaagaaaaagctaagtaatacagtgctttaaagagatgatctaggtaattctcacagcagattttctgaggtaggtgtattattactccattttgtatgaggttgtgctaattcttttcccctgggatcctgccaagctctgcccttctataatgctaagtcttggtatctggcagcctcagctctccattaggttgtggtcagtgggccttgaagaacagcattgctttattggatttggataagaaggatgatgctattggagactctcagggctagagggactctctcttgggtccctgctggtgattggaagggctaagagtggtcctttatatgcctttattttacagagaggaactggcttctggaaggctacacctgcagggttggagtcaatgtcactccccagaacctactgtcccagaggtctatgaggatcccagtcccaggatcttgtggctcagctgtagtgatgacctcccagagggatggggccaaccaggccacatgtagaactcaaattctcctggtccctagtggccatatgcatgacagctacaagctggctcaggcattacaggaatcagtaagggaaaagcatctcagacacagcgtttcagggcccctaggtctgaattgggagacatggcttcagggtctgcttcccagttgagactcctgggcctttgcctgagctgaccataggacctcctcatgcaacacccattgccaccaaggccttttcctgcccacattgccagagcacctggccaaggccttcctccctactcccagtacatccctcgtgcctgcttctccccagatctggaccctgctgtgttatgagcccagaggaccaatgtgcaaaccatggaatgctgcttcctgtgaagtgaagatgtgtatgttgataaaccccaacagttcttcttagaagcctgtagcctccgatggctgcaagggcagtggatggagcaactgcaaaagcagcatattgattgcaaggaagtaactgaagggagagttcaaaatgcctcctggaaggcaggcagccctcggctctggcgaggtgctaatgagctccccagccagctccagttcgacctgccttttcccagcaaaagacccagggcctatgtcgagaagggcagcaggaagtgggggcgatggagatgattaatgtagagcagcttcatggttcataccagctctgctctctaagtcttttgtttcttcctccttttatcttcacaaggcaaagcaaagagcagcgcatgccgtgggaattccttcctgtaatgtgttctgatctgtttgcttgtataaatgagcccgtgtttcagaagagagtgaacccccctcgtctaaagggacataaacccaaggatttgctccatcctcccgctgtgatcttggccaccctcctggctttctaagactgagttaccttgtttccatgcagatgtcagaatgtacacgtcatctgcagggcaggtggttaaaccccatgtctagagagggagttgcttgaaagcaagcatgtgccagcgtattgaagtaagtgagggtggaagtaaagcacctttatttccacatgaggttgcatcattgtgtttccatgctgagaaggcctctcgagatatcagtgttcccatttattcatcctaaaactggtactttgtcttctatacaacctgtgtatgctaaagtatgtctgcaatacaaaaacaaggaagatgtaggccaggagataagtatccagggatcttttgtagtgtattaaaatatgaacatctgcattcccttttcaccttgaattttaaaaatcagtacatttttccttcttttcagagataatactttaccaccacgtttaagttctgggccctgaggcaaatatttcagctgttgagcccccaagcatcggactttcaatgaaaggaaacctgagttctaatcaactttgcagcaagaaacttgcaacaagaaacttgccaaacctctaagcatgaaacagcacgatctttcatcatttgatgcttttacctctgtggttttctttgttctatgcctgccccttcaccttcttctcgcagtcatccttcaaagctcatgttagatgtcatcctctctgtgaagacttctacagcttccccaagcagaaatgaacattccttcttggctctgccaaacatatctctatttaaaatatgcattgttcacttgttaattcatttactcacatatttattgcgtgagtagtatatacccaggcactatggataggtatccagagattcgattcaagggtcaatgaaactgatcaagcacatactatagaccagagctgcctaatagagctttctgctgtgattggaatgttctgtatctgtgctgtctggcatctctggctcagtagccacttatggctatcaaacacttgaaatgtggttatcatggctgaggaatggaattttaaattttatttatttttttttagaaaagtttaaatagccgcacatggacatagctggtggctaccatattgggcatcactattctacagggagagatggactttgaaagagttaatggaacaatatagaattacaaattgtgattgagactttgttgggatcaaatagagcatcacgacagaaagtaagtagggggctcccttcggtaagtggacaagagaagcttcttggaggaagagacatttggtttaaaacctggagaatgagaagatgtcagccatttaaagagtaggaagatgacctttatggggaaagggatcagtgagtgggaaactctagaggtaggaatgagtgtggcatgttgaaaggactgagggtggttgatgtggctgggatagatgggtgagtagtgggagtggaggctggataatcaggaatcaaatcacttaagaccttagaggccacaggggagggaaaggggcttgctggacatcccagcaccagtcaaagagcagagcacagggtgcatgtctcctagctgttagctccatagtttttctgctgtaccatgctgcccaagcaatgtggacgcacaaccttcacacagtgctgggcctggtggtgagcctcatctgcattctgtttccattcctgtctctagcctgacttatttaggcctgtctaatttatgtagcggctgtacatgggtagtgcatgtcaggctcgggggcctgcctgtgtttgtgaaagagaaatactaccatctccactggagccatcttttctgatcttgcctgctcggtaattaagattctggaagcatttagcacaaggaggaattgctgtaatgacaagtggatccttctgtaacctccacttaattggatgaagtgacagccccagcgaagactcaaataaaatttggtgcaattagactgcgctgaacgtctggtgccagaaccagggtggaaatcttgcagctggctcgtggaaccatagaggaatctggttgcacaaggggaggctgtgtttgcaggctaggtgaagatgttcttgcttcaccttttacctgcacccctcccttccattctgtaggtcttctctcaagattacttgaagggtggtggggggcacagaggtacagggagtatcttaggttgggttccctagaaacaaaatctgagacagagattgggtgcagaagatttatttgggaaagctgtatggacacccacctgtaaagaagtgggggaggctgggctgggcagagggagaagctgactcatgatgtagttacaaccgagggatcagtcaaccctgtgggagaacccaggagctgggatgctcctttagaattgcccccaaactgaggttagaggaccagacttttttattctcaaaccaatcagtcatcagccatgtcctctcacctccaagaaagcaaacatgatcttggctgagagagttcccagggaaggatgaagctgtgagcattcagcattgatagggtaggggtgcttccagcagcagaactacacagtgtttaccacaaagtgaaccagaactgacagcatttggttccctgagaatttctgatcttcctcagacattgactgcaaggtaaccacacaccctgaactgctctgttcctctcttccaattccctttgctctatcctctatctgttatgggtgaaaatgagaaagtctcttggctacctcgagtccaattttccctctattctttatccttcttgcttctaacactttcccaggcctccagtgcctctctcttattgctttctgcttttgtgtcccatggctgatcagctatgtctgaagtcagctattcaattcacttcctactcatgccatgattcttcccttttggtggtcttatttctagcagtgagtctggaagcccaacttctaccatctatcagagcaccctcctggagaaatatggaatgtgtgggctccaggtcagtcagaccagaataaggttctatgttctgccactttctagaagaatgacgttgggtagtaagtcaggttttctctttgtcaacattaaggacacagacatggattcatgtgtttggtgtcatactttcattttgagcctttctcatttgtaaaattagggcaaatctacctgcatcagagagcttttgggaggactaggaattgtatgctgggctcatagcacagtgcgtggcatatggcagaggttatcatccttgttggcttcattggaagctgtggtcaattcagcctggccaagggaagtccaggccaaatctcagcttagaacccagatgctggaatcctgagtgtagcacaaaatcttgagaagagaagaggtagccatggggaaatcaggttatctatgatttcatgggagagcctccagtcaagtccaagcccactccccaagagatctgaatggatggataccttgaagggtacatctgagtgcaatcctgtgtctcacagccagggaccaagctgcattcattcctggatcactcctttcctctgcctgtactgtcttcccagctttctcgttatatagccatggcctcacctttcacgtgggagaaggagattgtgagagtcatgtcaccccagtcccgtaactctggcttgttgtaggcatctttctgtccttgcatgcagcgagagctgacggaatcccacatctcagtcctgttcttcccctattgttggacacacagcaggactccacgggcaagtggaaaagaaaagccttgatcactgtttattttccttaattttcattgtgcttcttttatttttacccttgattacaagcaacagaaaatttcctctgtttttttctccccttttgcagctgtgggttttaatagcatccgctagaccgacccccctgggtagactcagaaaggagagaaattagctaaaagggaaacaagagaagcatttttagttcagggtgggagcctcattttgccaaacctgaggtcttttgcctggttccagagccttctttcagtgtcaacctacagcttctggagatgaagtgttttttgttgttgttattgttgttttgctcctttttttttaatttgaagacaaactcacctcctcgaagcccctctatggattgttctgtgagttgagtcacatcatttatagagagaaggtcaatctacttgtcaagtggctaagaatgtggttattttcctgttctttgttcactctttcagtcttacatattcattcattaaacatatgtaggtacctgctaattgcttgcattttgccagtggctaggatgtgaagttaaatgagatgatttcccctaacttcaaaggtgctcgtggcctggccagaaagacttggtgtgtaaaccaagaattgcaatgaagggtgagcaacgtcacatttagaaaatggtcattgttagcgcatgggcccgtggtcattgtcccttcgctcagttccgtgtgactttggctgcgataccttttctgcccctgtttcctcatcagctgtcgtgtaggaacaatggctttaccttagaagattctgaggattaaatgagatactgtatatgtgtgcttggtggaatgaactagaggtaactgctagtcaatgttggatgctcttagtgctgttgctgagtaaaggagccaggctgtggcttcagagactgggtttcaaaatctagcctcaccactggatcatttagcctatggcaagtccttacctctccccccttgcaagatgataatgtaattttgctcacaagtgaggcactgctactcaaagtgtgatcatggagcagcagcagcagtgatagaaacttatcagaaatgtaaattctccggccccaccccagacctattgaagcagaatctgagggtggggtttaggaatctgtctttaaagtccttcggggcattagaatgcctgggaaaaatttgagaggcactggcttagagataaggtatgacagttgtgtggcacagaatctgcccaaatactgatgcatggtaaaggtatttacagctgttagtgaagtgagagcaaacataatgggcaataattcttttcaagggtgctgcaagttgccctggaaggtcgtctggagccagctctagagagataattgtgggttttgagaaggaagagagcctctggatggaggcacaatgtgaggaaagatacagtggtatttggaggatggtgccaagtttggtgctgctcatgcacaaaattcaagaagaagggtggttggagatgcagcaagagagatacaatccagtagagccagatcaggagggtctgatttgaccaagctaagaacgttggacttgtacctggagaccattaaaaggttttaaacacaaaagtaacaaggtcaaatgtgtcattagtaagatcagtcattgaggctgcagtatggtagcaggaacacctagtagaccagggaaaataacagtccctggagtctccagaagaaaactttctactgaattgaacattggtgggcataccagttgtccttttcttacttgttcttccatttgctttcctgcaagcattcactggatacctgcaatgctctaggcactcacggacacacacacatacacataagtgacacctctgtaccctcccatggtccacagtctcctgagaaagatgtcagttattagacagtgtgataaaggagggcatccaaaccttatcgaacacctggcacactgtaagtgttatgttaatgaaatctctgctagctattgtatcttggcagtgttcttggtgtgttccaactgtgatcttatttggcctcacagtgacccattttacaactgaagaagcttcaccgaaagatgtcaagtaacaggtcttacataggattagatatctaagaggatatcaaatttgggacataccctctttttttgcttgcattggaacgggggggatggaggcccaaatgagaagagcagtcaggagacaggcacaaggccatctgaggttccccacaatggaggcctctctctgtcctgtcagcagcagggcagtcttcaaaagatgttaaaaagatgggcgtcgtgatcagagatactctggtacctcagagtattggcaggcaaaaagtgaggccttgggaggtaaccttttgtgaggggcactgacatttattcatagcatgtctgcttctttgcctaattctcttaagatctgtgtctgtgtcaaaatctcagcaggatgaatgaggtactgaagctcttctattctcccactgcctctccctgctcacacacaaaaatcccattagtaacagctcatcagtctccaaagtatagtgatagcatctgctgagggactgaacgtgagctgcacgtgtgtgtgcatctagagaatggaaggcaggaggaggacaagagagatggaagagcccgaggccctactgtgtggtgagttcttgacacaccagctcgtgtcttctcagcatggggaccagatagtgttcccattttgcaaatggtaaagtgaagcttacaaaggttatgtgtctcactcagggtcacaaagctgacagtaggctggaccagccccttttgccaaaggccatctggcctcagaatcctggttttgtttgtggctgcccgtaggcaacattgctgcaggtaacacctcagcaataggacctagtctttatgatgggcaagttaccatccactccatggccgtaggcccctgtagtagcagaataatggaccccttaaagatgcccacatccaggctgggtgtggtagctcacacctgtaatcccagcactttgggaggccaaggcaggcagatcacctgaggtcaggagtttaagaccagtctggccaacatggtgaaaccccatctctactaaaaatacaaaattagccaagtgtgctgatgtgtgcctgagatcccagctactcaggaggctgaggcacgaggattgcttgaacctgggacgcagaggttgcagtgagccaagatcatgccattacactccagcctgggcaaaaacagcaaaactcagtctataataataataataataataataataataataataataaagatgcccacattctactgtccagaatctatgaatgtattctctcacatagcagaagggattttgctggtatgatggagttaaggattttgaggtgggcaaattataccaatttatctgggcccaccgtaatcaaaaggggcataaaagagggagggagggatggtcagagtcagagtttgtgaacacacacgtgcatgtatctttgtaatagaatgatgtatattaatttgggtatatacccagtaatgggattgctgggtcaaatggtatttctggttctaaatctttgaggaattgcaacactgtctcccacaatggttgaactaatttacattcccaccaacagtgtaaaagtgtttctatttctgcgcaacctcgccagcatctgttgtttcttgactttttaaatcaccaagtttgtggaactttgctactgcagcaataggaaagtaataaaagtccctaggacttggaaggcaaatgtcacagtgagctgctttgcatgcacaaacaagactggatttgcataaccttggccacccttcccttctctgaacctcacttttctcatttgtaaagtggaggattttaatactattgtacaagtgtttgtctacctcatatacattcttccaatcccacctgagatgataaatctccctgcctagatgaaatgagcctgtcattaaacattctcaaggcacctgctctttcctttacagcatgtttgtttctagttagagtttattgaggaaggtttttttttctttctttttttgagacagtctcactctgtcacctaggagttcaagaccagcctggccaacatggtgaaaccccgtctctactaaaaatacaaaattagccgggcgtggtggtgtgtgcctgtgatccctgctactcaggaggctgaggcaggagaattgcttgaaccagggaggtggaggctacagtgagccgagatcattccattgaactccagcctgggcgaaaagagcaaaactcagtctcaaacacacacacacacacacacacacacacacacaaaagatgtccacatcctgctgtcaagaatctatgaatgtattctctcacatagcagaagggattttgctggtatgatggagttaaggattttgaggtgggcaaattatactgatttatctgggcccactgtaatcacaaggggtataaaagagggaggcagggatggtcagagtcaaaggaggagaggtggcaatggagagagagagaaagaagaagagattggaagatgctatgctaggctggagcgtaatggcaggatgatagctcactgcagccttgagctcctggcctcaagtgatcctcctgtcttggcctcccaaagtgttgggattacaagcatgagttaccatgtctaggcatgaagagattatttacagggatatgagcagaattgaggaaacaaatgaggaatgaggaggcagccagggacaaacaatagcagggagctgttacttcccaggtctcaaggggcaggggagggagtggtagaaactaagtatgaaaactaagaactttggggtaggggatggtggagggaaacaagaaagaaatgccctgagctttgtttttgttttaaatttaccttctacctcctgctgtagcctctcactggctgagccccactggccaccagagggtaagagggctgagagatgcagtgaatagatttgggcctccaggtgcatgagggaggacagagactgaattaggggagcaaacagaataattgaaacaaccacacagctggtgttgatgcattttcattgttatgtaatatttcttcataagattgatctcagtggttaatattacacttagctgattagattaaaaagtgagctttctgaaggcaaggattttattgctttgcctaccattgtctctccagggacagaacacacagtgggtgttcaatgaatatttgctgaatgaacaaatgattcaattcacacttgtgaaaatactttaaaagtcatgcattgctacatacaagcttattttcactcattgagacagcctcggagaggtaatatgaactcactaagatcaaacaggaagtatcaaagcaaggatttgagtcccagtcttctggatccaagcccagtgataatcccactccagtccagttgcctaccctgtccagataggagagcaaggattctgcctttggctttcaaatcacagccttctgatctgcccatcccatgtgggctccttgggtggctagctccccatgactgcttcctggggtagggtaccttctgcaaggaatgacaatgaggatatctcaaaagcacgtggcatcttgctgggatctcctctgaatttagaaacacacagttggctacattgggtagaaagggaggtgtgtcctgtccctgtagggtagagtggaagaggggtattatgcaggccctgaggatctgggaaggggagctacaagtccttttcaggcccctgaggatagaccacaggccacaactgcactgaacatggcaggtgcccgcattgctacatctggcccaccagccacttctggggatatggagatagtgagctctgtgggagctgccccacagcccagctcaccgggaaggccgccctgggaggcagtcactgcagcttcgaatgggacatccggcccctggttgacctgccagctgcttccgagctgggcaggaccatattcaagccctcgttttctgtgtgttcttggtgtggcccctttttctttaatattggcaaaatgaagatggtaagacaataatcccttctttgcaaaaccaggttggagacttaatcaaaatcgtgacaagacagcactgattgagcatttatatgttaggcattgacctaagcactctatatacatttacttatttaacactcccagaaagtcaatgagataagtactactcttacccctaggaagacattctgaggttatattcatattattaccaatgaagacaactgaagttgtgacttgttaaagtcactcattcagtatcagaagcaggatttgtactcaagtcatctgagtctggcaggcatgctttccatccactaatgtttaccaccttccaggataactgcagacttgttaaagtttgccatagtcctgaggaacatgtggtatgcgatgagctcatttctggggtgttgtgcacatagatctgtgctgtcctgtatgtcagctgttggccatgcgtggccttttaagttaattaagcttaagtaaaaataaaaatttcagtttcttggccacgtgagctgcatgtgcctagtggcaaccatgtgggatagtgtggatatagaatatctctggcattgtggagggttctgctggatgctgctgctgtagatgaagacattctcctacttttggacagagagcagacagagtgacccagagcactctgagactctcagaaaggacagagacggggagtcagctcccagcgagggtgcagaaagtggaatcgacaggcatttcttttgggaagtttctagccagcccatttacagtagaagcagatgtctcatggagcttccatccaatgtcagatcagagaagagactatttccaggagcaggagggtcagttgctaatgtccaggggatttagtcacatagaggccattagtgaattaagccagagatgttctggtaaggaggtgggcattggaggtgggtgtgaggcagtggagacagtgggcatgggtaaatcttgctggagaccagcaggattggcatcaccttggagtttgaaatgcagaattctggacaccccccaccccaccgactgaatcagaatctgtgttttaacaagttcatcaggtgactcatagacccgatatggtgagaagaatgtgcagagaggaagggaggacacttgggaggaagcaaagaggccagcaagcaggatttcccaatgcagctgagcacagtgctagatgctgcaaggaagggaaagggaacaggtgcagatacctctggcaacatgggggcattggcatccttccacaaagtggccccagcagagtatcaagacagacacaatttcatgagtccctgggggatgtggcagcagccaccaaaggatcagacatcactgggaggttatcactaaatggcattttactgatggtctgaaatgggttggcctgttgataagtggagggaggtgtctgtgcaattaggagatggaggtgagggatgcacctgtgtgtgcgtgcatggatgcacatggcagcagggatttccttggaaaaggccagaaacctgactatgaaactggctcatgataggaatgacaagggaaacttgctgctctgatgtcagccccaggatgctgcagagcctgcaggtcccacagtccattcacaccccaaactgcactgactgaccctcttcccctaacctgcttctttgtttgtgtccgtttctcagcatggctgtgtatccacttgtccaaccagaagcctgagggccagcccgactgctccctccccagcccttgtctgattggtcgcctgattacaacagcattacacatattcgctgcccacccaccacgcttccatccacccacaccgccaagacctgagtgacacccacatcctcccatcacatgaggcctccacaaccctgcctcctgtggatccatctcatctccagttcaccatcatgcacttcccttgacatccccttgttccttgtctttcaggggctccctgctgcctttaagatacattttaacttttgagtctgacttcaagtacccttcatctcctcatttccaggcatcctgtccctgggtttgccttctttcaggcccaagtaacttttgttcatgaagttacccttgaacatgcaaactccctgctttttgttcatgctgcttgaaccgtggtctgacctccttggaggagtgctgtctgtgtagagctaacacttcgttctgtcccacattcctcttgtttgacacttgttacactttgtcagttgtgtgtttgtcttttcacattgacaggctgtgagctcagagcatctgggacagtgtgcaggcagacagggtaagcacagggctgcatgccaggaggtctctcgagcttcctaagctcatcaaggttactggaccccaactctctagtgagagacagttatattcaaaaatgcctgcgacacattattctatgcctctatgacaagcaattctgacaaaatatcttgaaaacagctgctaagtatgtgatctggggatttgacagtgcagaaggacaattctgcatactcaggaaagcttggagaaaatccagtataacttcagtcatgataatgaattgtacttattcaagaaggagccacattttgataatggggaggcaagcacgacttatagacaacttctctctatacaaggagtgagctgtggacacatatattctggtgacaatggaacattcgtcagttttttcttgcctttgaccctttttctttaactcttatttcggaatctaacttatacgtcagtttcttcattgacccctccataattcccacctctgcaacacacatctcaccttacttccttgcaatcacttgcttatatgcattctcttattgcactaccagtcagacacaaccatgtgaccttgggctaatcagttaaattttcatgcctcagtattcacatatgtaaaatgggaatagtgatttttacctcccattctgctaagggatacacatgatatcatttatcatgcatgtaagcccacggttcggtacaaaggcaatgttcaatatatattcactgcacttttcttccttgttcagcatcccagtggaactgttatctcctcaagggtatgaaggatttcttttttccctgtaaatcacccagtaggcatttagtatgtgtcaaaggtgagtggctaaatgatgagtaagtgagttaaatgaaacttgttatttcttacaatatctctagtatctgcaccgattgtcccacacctaggggtcttgcccaaatgcatgtgagttcatggtggaggcctttggtaggaatgacccctttcgttgcttcatctaccacttctttgtcagatgtgtctttctccacatccgttcttaccctgtgtcagagtggcaggtgtttccatctacctggggacgtggggctgccctttctgcttcttctctgggtatccagtgacgtttatacactggctcttctgtttggtctctaaacatatccctatctctctcatcctgagaaagaacaccctgcttgatttgctcatagtttctataggtcaccatgaccatagacctttcactatttgctaaacacttcatatgcattgtcttatttacttctcacaatagcctttaacaatactctttagctgtaacattcccacattggagctgaaaaaaatgaggctcagaggggagaaataacttgcccaaggaccacggctatagagctaacttcttgccttcctgccaagctgttggagagaagtcactttattggccacagtttttcaggactttccctcaggactgggcttccataactatatctcttggtttcttaacaatttctacagctgaaccttttctgtcttggtcacagctttctgtttctgggcctttcccttaaatataatgttccccagagtgctggctaccataccccttcatatttctctttgtgagtgagtctatccaatctcattattttaattatgaccagggaggctgatgactcccacacccatatctcttgcgcggacagttctgctgaacttacgattaactagctgttggagttattcctgtggattgccacaggcacttcaactcaacatgttcttctcgaagttttcatctccatcattggctcaaccattcatttcttcagcgaagctaaaaagaaacctaagattcatttcagattcctgccttttcctcagtcctcgccctactccatccctgcatatgttcaattaaaacagacccaccaacttagctcctgaatatttcttgactatgtatctttcctaccatcactagtatcactgcattggctctcgtcagctctcaactggactcttgcagttccttattttttggtgtgtgtgtggataaacctttattttgaagaataataaaaatgcaggaaaagacacattataactgaatataataatgtaaacaacatcctgatcgagatacagaatataaccagcacctcagaagccctcctcggtctcactccaagtcattgattctcctttgcaaaggtattgtgactactagaattattttccctgtttttgaattttatataaataagagcataaattatatattttttggctagtttcttccacttgaaattatatttgagtctcatccatgttgtattcactttttaatttatttttaatttattttttttaaggcagagtcttgctctgtctcccaggctggagtgcagtggcgcaatctcggcccactgcaagctccgccccctgggttcacgccattcccctgcctcagcctcccgagtagctggaactactggcgcccgccaccaagcccggctgattttttgtatttttagtggagatggggtttcaccgtgttagccagtatggtcttgatcccctgacctcgtgatccacccgcctcggcctcccaaagtgctgggattacaggcgtgagccaccgtgcctggcccacgttgttactcttaaatagtatgtcatggaatgaatataccaaaatgtatccattctactgcttacagacatctgagttgtttctattatttagacataatgaaccacgtgactgtaaatattctgtacgtgtttttggtagtattggactccatttctcttggatatgtaactaggagtagagttgttctttggcttaagcagatactgccaaatagctttctaatatgacagattgcatattggtgttgtctgtgttttaatattagccattctggtaggtatgtggtgatagctcattgtggtatttttctgatgactagtgaaattgagcaacctttacatatgcgcgtgtgcacgcgcatgcacacacacacacacacacaggtgatcttgatgtcatgtgtttgaattggatattcaggtcttttgtttttttatattgagttgtgtcttattgatttgtagttctttatatttactagatctgagtccttgtatacatatcataaatatcctttttctttctgtagcttgccttttcacttaattaatggcatctgttgatgaataacagttttgattttaaagatgtcccattatcagtcttttatttatttttgccatatttaagaaatacttgtgttccccacaataaaaaaaaaatcctgtctcacattatctttagaatttctattactctacatttcaaatataggtctatgtaatccatctaaaattgattttcacataaagtgttatatagatactataaaaactgtcactttgattctgtctgtatggatatcagttgacccaggactcttgttaaaaatatcatctttccccagctgatttcagttgaacctttataatatatcaggtgtctgcatatgtaagggtttattttggatcttctgctgttgttcttttttttctgtagatctattttttatcattattttgatgtcttgttgtcttaattgttatagctttatgacaagtcttgaaatccatgtaagacctacacctctgcttttattattattattattattattattatactttaagttttagggtacatgtgcacaacgtgcaggttagttacatatgtatacatgtgccatgttggtgtgctgtacccattaactcatcatttaacattaggtatatctcctaatgctatccctcccgcctccccccaccccacaacaggccctggtgtgtgatgttccccttcctgtgtccatgtgttcttattgttcaattcccacctatgagtgagaacatgcggtgtttggttttttgtccttatgatagtttgctgagaatgatggtttcctgcttcatccatgtccctacaaaggacatgaactcatcattttttatggctgcatagtattccatggtgtatatgtgctacattttcttaatccagtccatcattgttggacatttgggttggttccaagtctttgctattgtgagtagtgccacaataaacatacatgtgcgtgtgtctttatagcagcatgatttataatcctttgggaatgggagaaaatttttgcaatgtactcatctgacaaagggctaatatccagaatctacaacgaactcaaacaaatttacaagaaaaaaacaaacaaccccatcaaaaagtgggtgaaggatatgaacaggcacttctcaaaagaagacatttatgcaaccaaaagacacatgaaaaaatgctcatcatcactggtcatcagagaaatgaaaatcaaagccacaatgagataccatctcacaccagttggaatggcgatcattaaaaagtcaggaaacaacaggtgctggagaggatgtggagaaataggaacacttttatactgttggtgggactgtaaactagttcaaccatgtggaagacagtatggcaattcctcagagatctagaactagaaataccatttgacccagccatcccattactgggtatataccctctgcaatttttttttaaatagcaattatttttttgctcacatgtctgtggtttagttaggagtcagctgatccgagctatttagcagagcatctctattcaagctgtgggtctggccagctcagatctatgctcttttttcattctgagacccagaaccgtgggagcagccaccaagagtggaagattcttacaacagaagtgcaatagagcaagtcccactgcacaagtactttttaaacaatgtattttattttttagagcagtgttaggttcacagcaaatgtgagtaaaaagtataaagttcccatatatctctggatttgcacatggactcttttaatcaagattgttttaactatttttggttctttatacttccatacaagctttagcaccaatatgttgatttatttaaaaagaaaaaatacttttgggattttgatcaaaatttacgctaagtctgtagagcaattttgggagaatctaccacttaattggaaccttccaatccatgaatatggtatctctcttggttccttatgtttttttaaaattctcagaaatgtgttaaagatatttttctacactgtcacgggttgcaaagtctctttattttttaatatttgtgtatatgtatccattgttcagactggattagttctgttgatctgcttttatattcaaggactctttcttctgcagtgcctgcactgctactaaccccagagtaagctttttattttagatatggtagtttttagtcatcagatttttatttttattttcttacttctgatgtctctgctgtgatttcctagctatcctcccattatatccaattttctttaaatctttcaaaaatatttatagtatctattttaaagttctcatctgcaaattctaacatctgaattatcttgggatctgttcattttactccttatttgtttgcctatctaattacttatttatgtcctgtttgttacctaagaatggtagatagtttgctgtaggtggtctggattatattgattggacttaaatggtattgaattttatcctggtaagcagttaaattaccggcgtgtccttctgaaactgtcattattgtcttatactttgttaggagggatctattttggcttatcagttatcttcatgtgtgtgccttactttgattttgatgtaatattcactactataacctgctctttctgaagcctcaactgcaactccactgcaggtgggccaggattccagaggttcccagcactggtcaacctctcacatttctgttcagctctcagccctgcatcaaccactcttttctagaccttacagagttttaccttgcaaatatgcaggccagccaatatccaaattctaacaggtactccccatatgaactctctggtacccttcctcacaaattccagatgagtcagcagcccagaactctaattcgggttcctcagttcaacaagactgcgatgctgtttggcctccacctctctgtgtcgggtctagaaaataaccaccaggcagaaagccaagacaaacatgagtctcacttctgtatttcttcgctatcaatgatcaaaatactgtgctggaaaaaatcactcatatatttttgtagtgttttgattgttttggcaggataccaagttaagtgccagttagtcagttgtggccagatgtggacgtgtttgtcatgagatgctggagactgaaatcacctttttgtctgctacatagtgtactttatactatgatctctgtccaggcagaattgtatcctgtttatagttgtatttctggcttctaatactgcacctgtcacagaatttgtacataaataataagtgagtgtgtgttgatttgactcatagtttggcccccatctggacactcattggttcatttaggatgttgccagatgacagtaaagtgagaaaatgctcatcaggcagctggtccaaagtttcctccaaaatgtggtcttgccttttctctattccacatgattcttagaaccccagaaacataaagctggaaggaagtagacctgagacctcagctatcccatagctctttttgaaccagtggggaaactgaggctctgagagggcaaggtgctcacccaacagctgcatgggaaatgagagccctacctagagcttggttctgcttacttctttccgtgttgtcttagtccattcttgcgttgctataaagaaatacctgagactggataatttataaagaaagagatttaattggctcatggttctgcaggttatacaggaaacgtaatgctatcacctgctaggcttctggggaggtctcaggaaacttatagtcatggcagaaggcaaaggggaagcaggcatgtcacatggcccgaactggaggaagagagagggggaggtgctatgcacttttaaatgaccagcttttaagagaactcactcactatagtaaggacagtaccaagagggatggtgctaaactatttgtgagaaatccgctcccatgatccagtcacctcccactacatcccacctccaacaatcggggttacattttagtgcagtctggcagggacacacatccaaactgtatcacatgtcttccttcacttatccctaagttcatttttttcaaaattgaaaagaaaatgttaaaagtcttacagtttcatttaaggtatatggtgaaatttctgaagagcaatggatgataggaaggcagataatacaatgtatactgggaatagagaagagaaaaattttgcccatgagaaacctttgggtagtgggctccaggaggaagatacttgagattcgtcagcatcttcagaatgtgcttttgggaattttcttgattcttattcaacccctggctggcagcagttaaaaatattgcaatgttactcatttttttgtggtaatatatttatgtggttcaaaaaatcaaaagaaagaaaaaggtacactgaaaattactctttttattccttatcctagccacacatttctcttccctggagattaccaatgttactctgtgtgtgtgtgtgtgtgtgtgtgtgtatgtgtgcgtgtacgtgtgtatgtgtatgtatatctttccaaaggtatttcatgtgtagattaatcaaaattaaatccccatcatattatcttctttttcttacataaattgtagcgtatttcaaaaactcttttggctttatttttttccacttaatgtatcttggatgtatttctgcattcagacataaagagcttcctcctttctcatagctctgggatattccattgtatgcacgcaccatcatttatttacttgggttctataggtgggcatttggattgctttcagttttttcctgttacaaacaatattgcaatgaattactttgagcaaacattatttcactgtgcaagcatatctttagcataattcctaggtctgagattgctaaacatttttaactttgatagatatggccaaattattctccataggggatgtaccaatttataggcctatcagctatgtgtgagagttgacatcagtttttattattatattttaagctggaaatcaccttacatatcacttttccatttctcttgtgctatgaatagggagtccagggctcagagatagaaccaaggtcacgctgatagtctgtttttgaggtggtcgtgaatctgggtatcctaactgtttagcctgagtgatcttgcataacctcagggtgcacagatgtgtactgtccctggcaaacatgtcatctcactgagtatcatcaactgggaggagtacatagaacctgtctcttagtacccaaagttctcagtaggggcttcttttttgggctgctacataatgtttgcttctcttaaaatcagggctaacatacccactgccaagccagttgtggcctgagaaaatctaagctgacatccaggcagggcagaacccacaattagatcctgtgggacttggggaaagggactatcttggcacctggacctcttcgggagcctgttgagagaagaacaatgtcattcaggattattttcctaatgagatacctcttgctgtcagaatgccctcatgcttggcatctcctgcatcacctttgtctcattagtccaggtaatgaatggcacagtatactgctcattttaaagtgggattcttgtgacatccctgcttccacttgaacacaatgttgggttatccaggcatcaaggggcagagggaagtttccacagtgaatgagagtcatgggctgtggagtcaggccacctgaacttgagtcttggttctatcagtggtagccatgtgcttttgagccaatgatttcatctgtcagcctcattttctccacttgttagagggggagagtagcttaaagctatactagataggatgcaggaggtaatgctgcagtaacaaacagccccataagtccgaggctagaaaaaaaaaagttcaatttgttcatattccttggcatttggatagggctctactctatacatgggatccaagatgtgctagttcattttgaatcactataaagaaatacctgagaatgaaaaatttataaagaaaagaggtttatttggctctgcatggttgtgtaagctgtatatgaagcatagtgccagcatttgcttctggtgagggcctcaggaggcttccaatcatggtggaaggcaaagggaaaccattatgtcacatggcaagagatggagcaagagagaggtggaggtgctgggctcttttaaacaaccagatctcatgtgaatggattaccacagggagagccttaagacattcatgagggatctgccccccatgacccaaacacctcccaccaggtcccacctcccacactggggattacttttcaacaagagatttgtagagggggcaaacattcaaactatatcattccacccctggaccccaaatatcatgtccttctcacatgcaaaacacattcatttcttcccagtagttccccaaagtcttaacttattagagcatccactcagaagtcaaaagttcatagtcttatctgagactcaaaacaagttccttccatccatgagcctacaataccaaaaacaagttatttatttcaaagatgcaatagtagtacaggattaggtaaacactgccattccagaagggagaaattggcccgaagaaaagggcaacaggccccatgcaagtctggaacccagcagggcaggcattaaatcttaaagctctaaaacaacctcctttgactctatgtcccatatctaaggcacattggtgcaaggggtgggctcccaaggccttgggcattcctgtccctgtggctttcttggacacagcccatgtggctgctctcatgggttggagttgagtaccttctgttttttcaggctcagagtacaagctgctggtggctctaccattctgggatctggagggcagtggccctcattcccacaattccactgtgcagtaccctggtggggaatctttgtgggggctccagccccacatttctccatggcactgctctagtagagtctctttgcagggctctgcccttgtggcaggccagagtgcaagagtgaaggatgcttaccagcttccacctagatttcagaggatgtatcagaaagcctgcattctgtgcacttgcaaacataacaccatgtggaagcttccaaggcttatggattgtgccctctgggctggcaacctgagctgtatctggggccctttgagccacagtgggagctggagcagccaggatatagggagcagtgtcctgaggctgggcagggcagaagggtcccatgcctggcccctaaaaccattctttcctcctatgcctctgggcctgtgatgggaggggctgtactgaggatctctgaaatggatttaaggcctttcccccattgtcttggctattagcccttgtctcccttttagtcatgctaatctctctagcaaatggtttctctatagcccacttgaattcctcttctgaaaaagttctttctttctctcccatatggccaggctgcagattttccaatgttatactttctgcttttcttttaattataagttctgaacttggtcactcctttgttcccacatctgatcataggctattagaagcagccaggccatatcttgaacactttgctgcttagaaatttattctgccagttaccctaagtcatcactcttaagttcaaccttccacagattcttagggcatgagcataatgcagccaagttttttgctagggtgtaacatgagtgacctttattctagtccctaataaatccttcatttccatctaagacctcatcagcctggccttcactgtccgtatttctatcagcattttggtcacaaccacttaacaagtctctaagacgttccaaactttccctcatctccctctctttttctgaaatctccaaactcttccagcctctgcccattaccagttcaaaaaccagttcaacatcttcaggtacttttatagcaacactccattcctggtaccaattttctgtgttagtccattttacattgctataaaggaatatctgaggttgggtaatttataaagaaaaaaggtctatttggctaatggttctacaggctgtacacaaagcatactggtagcatctatttctagcaagggccccaggaagcttccaataatggtggaaggcaaaagggagcctgcttgtcacatggcaagaaagggagcaagggagagagaagaaaagtcctaggctcttttaaataaccagatctatgtgaacttattactgcaaggaggccatcaagccattcgtgatggatccacccctatgaccgaaacaccttccaccaggtcccacctccaacactggagattacatttcaacatgagattctgtggaggggacaaacatccgtaacacactgcaagatgatagagcagccgccatctgtaactttgctggtgactatgacaaagaggaaaagaggatgtggggaactgagcactggccctttctgtcccgaaggaccttaggtcctttgtactcacattttaataaccaaagcaagctacaagcttggcatgcctctgagtttacattacaccatgtagtatttggattttcagttctctgaggcagaaacctctctgtacacctccacctggcagcctccatttgcagcacttgctgcccattctctctgctatggatgggatttggtgtcctctctctggcttgacctttaacagtgtaattctgctcgttaatgccaatgctagcaacattcctatggaggtaggcatgggtagtcatcacccatttcaggtgttgtaaaactgaaactgctagagactgtattccctaagatcacacagcaaatatatggaaaaagagggaagtacaatttattaagtaatacattcataatgtctttattatgatagggcactgaggccacagaatgttaagcaacttgttcaagccactcaggaggtagctatggaaagagaaagaccaagacagagacctacgggaaatgcaaagtggaacgtgtagagcatgcctgctatcttgggcccttaacacaagctgcaattttagccccaagtatacggtgtctatgtttctttctcttgggcagggaggagaatggccacaaggagggcctgtgtggaatttctagagaaatgagtcattgtgatgtggtgatatattaatctaactgagaaatctctctctccagtggaattttataggatgtcagttctcatgtggttctctttttcaagtagcttggctcataggacaccatgcttcctattagagtctatcctgtctgttcaatgtgggctgggggcaagaaaaatcttgaattttataatattttatattcttaaaatgataaaagaagactaatgacaactttgaactaataatcctgtcaccctagtacatccaaagtctctttgattttttgttttatccacataaatatgtatttggcatagataccatcagaagagagtaccattttatttcagttattttaaagttaatgctatattacacatattttgcatatttctttatgacctttagcatttttataatttaataattgcatacaattttaaggagtgaatgtacctacctgtattggttttctatttttgcataagaaattaccacaaacttggcagcttaaaataatttatgatctcagagttctgtaggttagaaacctgggcatagcatggttggaatctcttcaatataacacaaagctggagtcaaggtgttagctgagctgaattttcatctggagacactggataaaaatctgcttcaagctcattgtgttttgattttcgagatggggtattgctgtgttgctcaggctggtctgaaactcctgagctcagctgatcctcttgcctcagcctcccccagtagctgagactaaaggcatacatcaccatgcctagctctaggctcatccttgttgctggttgaattctgatccttgtgatggtgggactgaaggccccatttctttgctggctattagccggtggccactctcagctcctagaggccacacacattctttgtcatgtgcttccttcatcttcaaagccaaaaatggagcctgtctctcaaataaaaatgttctgacaccacacatctctttcgccagaaggaatttccatcttttttaagagttcaccttactatgtcagatctactcagaataatctccctttcttagagtcaagggtgccatgtaacataacctactcatgggaatgctatctcggcatatgcatgctcccaaggattatacagggcccgtataacaggatgaaaatgttaagagccaacagaattctaccaactcattatcttttcttaccattctattaatttcctagggctgctacaacaaagcaccacaaactgtgtgtggcaaaaaaaacaacaaacaaaaaaacaacacacagaaatttattcactcacagttctggaggctaagagtctgacagcaaggtgttagcagggccagactccttttggaatctgaagggtaattcttccttgcctcttcctggcttttggaggttgcctggcaatctttggcatcctcgtcttgtagattcattactccagtcctctgtcttcacactgcattctccctgtttccctgtctgtgcatcttctcctataaagacaccagccaaattggattaaggccaaccctattccagtatagtgtttcatcttgaacagattacatctgcaacaaccctatttccaaataaggtaacattctgaggtactgagggttaggacttcaacatattcttttgggtggacacaattatatgacaatatgctgtaattgtatttttaggtatttcaagattctgtatggcacataattttgtaataatcattgttgattctgtaatagtttcagttatttctttatctagggagtccctagaatgagatctttgcacataacaattctttctaatgaagaaagaagaaactaaatttttaaaatgactgctatgtgccaggtgctgagatgcctatgtgcccatatgttttactttctatgctcaatacaaaatgttgagatattagcaacttttcacaggataaaaatactttaatgcagcaagtaacttgctcaaatgtacgtacctagtacatccactaatcaaggcccagcaaaaaaaaatacaaactccagatgtttcaaacagaaggaatttaatgtagggaattggttgcaaagatgagccaattcagagattaacaacaaacagaagctatggtgggaagtccagcattggcctgagatgctacaagaacatctgcctaaagaagagagggttagtggggagagagacagatagacacacacacacatacacacacacacacacacacacacacagagagagagagagagataaagagagacaaagagagacagacagacacagacagacagacatacatgacctggagtctccctcctcctaatctcctaagagtgcatctagctgatcaaatcagaagccagctgaggagcttgggaaacctgttccccaccccctaatctccactccaacctctccccattatacagagcagaacagatcaagggcaaggaatctatctaatggtgaacaggcctaggaccatcctagtccataatagtaagagtaatgttcataacataatcatatcaatagctaacatgtactaaatgcttattattatgtgacagacaactacagttattccctgatttcatcccagccttgagtcccccatgtgtctaagcatcttggaagagtagacataacagaaatgagaagccacaatagaagccaaggttgccatgaggactgcattaaatgagacaaggtaatgaggaagtgctttgcaagtctgagagcattgtgcaggtgacaagtgacatgattacaacagaccaaagctgcactttcacaggagtcttgatttgcacattatcattattattattgtaaggtcctctgagctagccacaccatggtcaagccatcgtgacattccctgtccttgtgataatgtactttgtgatattccctttccttgtgaatgtactttgtaacattcctccccaccctagtgacaatacacccccgcacctccccccaccccgcccttgtgaatgctgcctgcaaaaattgctcctaactccaccacctatcccaaacctataagaaccaacgataatcccaccacccttcgctgactcctttctcggactcagcccacttgcacccaagtgaataaacagccttgttgctcactctaagcctgctcaagtagccttttatatggacgtgtgtaacaattattattattattatttcgagatacaatttcactctttttgcccatgctggggtgcagtagtgcaatcttggctcagggcaacctctgcctcccgggttaaagtgattctcctgcctcagcctcctgagtagctgggattacaggcatgcaccaccatgcccagctgattttgtatttttagtagagatggggtttctccatgttggtcaggctggtctcgaacttccgacctcaggtgatctgcctgcctcaatctcccaaagtgctgggattacaggtatgagccaccacgcccggccgcatgttattatttttgatgctcatttggaatatgatttgaagtatgacaacaatcgaataggaaaggtattcatttcagtgtaggaagaaagtaaacagccaatacctggagcctctattctgtatcagcccctacatgaccctttccttcagagagctttgcagtctggggttatgcataattacagttcggtgtgatgggtgcataacagtgtgtgtgcagcatagggaagtagcagagaggcatgagggtttgttttgtctacctggggtcagagaaggcttcccaaattagttctgtcagaggatcagagaagaggggttttccagttaacaggatctgaatgtggaaggtagaaaggcccagaatggtatttagtttgccatggcacaagatggcatgcatgacatggaggtggactcaataggaaagcttgattatggaaagaattctgtatcaggaaaggaagtggaactttttttttttttttggatatcaacgccttccagctaaagaccattaggaacacacccatagttgaacaagttgggtttatgacttattgtagtgagggagaatgtacaccacagagaaccatggggtgtctcggcaagacagtgttaagggatttgggctttggatggatgattttgggagacatcaagggggtggagttttttctagattgagctgttaggaagtggggacaattctatgattgaatatctgaggaaacctaatctagaaggggataatagtagagcaagattaaagctataattggtagagttgcggcagccactcatttgagctggacaagaaagatacatggtattttgcgatttgcacagtgaccttggttttgtcttgcttagaaaaaaaaatatgaagtcatcttgttccttatcacttcactgtggctacagaatgacctgacctgatcttggtgttgtgtaagattgtttaggtccaataggggaacaaaatggcctgggtgagaaagttgggccagcttccaacaacatcaagttttagctgataggaccaaaccccggatgacaggagctgcttttctatttcttagagcacagtaggaagccgcagagagctcgtgtgcaggggcaagtagaggtggcatctggttttacaaagctctctaaggcacacgtgatgtttctataagtgactgttccttggattcttgtatggccttggataagttccttccctctttgagataagcttttctgtgtagtaaatggaaggagtgaggctagatggtctctaagcttcgtcttccaagagctgaggtttaataaataaaacctgggttgcagtaaaaggagcagaaagaggagcatcagttggatcatgagaactctatgttgctgggcccactgcacatagctctgcctaccatagccaagaccacttttaggttggggttcaacttccattcaccccactcctggtaacaatgctctttctttacttttctcttatttccttttctgtctcttttttcttttctttcctcctttcttttctactatctttgtttttgttactcaacagaggaattttttttatggaaatagtcaatgaataggttttactggcttccagtgtgagctaattaaaggttcaaacagcacttccatagaattctggtgtgtctgtctctgtctctctctctctctctgtgtctctctttccctttctccacattcttattctctggccccacatggtcagatgaagtctgcagcagtactaatcccagcattctcccttatggatgaataaactatttatgattgcagttgggcagaattgggtcgtgtgtccatccctaaactatgggagtgggaaagtagatatgctgattgacttaagctaatctgaacctactctgatcataccctgctgctggcaggataaatcccaaaccatatgggctggctatgggataggggtctttaagagaaatttgcgaaggtgcttaaccagaagaattgtgaattgaatttgagaggcaaaaacaaaactaagagatgttctcctcagggatgctcagggaagtataaactgtgttaggtagagcctttgaatcaagaagatctggttctagctctgccactgactttctaagggaacttgataaacaccaccttgctacctcttggcctctgtttcccactgtaggttaatggtgatagaacagtgttctcaaagttctgtagggctgtggatctttacaatactttccatgggcctgcattcattacaggacacagggcagccctcccaggggtgctggacggccactgtttatggagatgcactgaagtagattgttaagagttttgctccctttgctagggggaaaaggatccatgggggttcagtgtgtcaagggagctttgtcagatgcagtacagagaatgcattcaggactggaaacattcaaatgacttttcaccccagccttttaaagcctctgcagcaaggttgtggtttgccttccttgcaaccttgggctctctgcttcctctttattatccgtgttgatccctggagatgttaatgagcattgcacattgagaagatgaggagaataccttctgggcccaacaacatggagacaccccaaacagctcaaagaatagctgtcagaataggcccatcatgatacaagcaccaatagtggaggacaaagaacactctgttcaaagttcagcaacactcccacaggaggtgggaggatactcatgagggtggaacaggatgtgattggtgggtgcagactgtgattagcagctgtgggaaatttgaggttaagcaagtgtgacaagtgggaagtgggtaaacagagagggaggggctgggattagagtcgggttagggtaagggttaacctcggtgacgcggggctgcacacactcttacctgttttgccacttgatacctctatggccttgcgtatatctctctgaatctcagtgctcgtatctgtaaaatgggcagaaacaagaactctagatctagctgttccacagtacctttggggactcaaatacctccaaggtatggagcactgtagcaggctacttagtgtgaggactatgaaaacgatgacagcagagctcgtgatccaagtgtcttcttggtgggacccttctaaatctttccctgggacaccacattctccaattgcggacatccagtctctataggattgcccacatcttgctctgccttggaatttgtgcacaccatttcaagtcctgagttcaccctggccatgcctgggagagactatgggatttgcaattctcaatgtaaaccccaggtccacttgtccctttttggggaatttcttctctccgctggctttcttttctgagctctgtgaggttgagcatatgctaaagagtcaatgaagagaagagtctctgagcctgaaatttgaaaagggggccctctaattacattgcaccatgacattttctcagtaacatcatttaagcatcccacggtagcacctatcattactgactaatctactgttgtgtgggttactaatgcctactgttacatcagtgaccttccctgcctttctctgattctggtttggataacttaccttgcagttccaggattttctccagaatgagcaggaatgactcacattactgccctaaaatcccgtggaaatgtatccccactctcttccttcccagtgtgataaatttgattataacttacggatggccactcatgactctgcggtggtttaaaatacaccgaaagattcattcgactaaactgagttgtcaggtggagagccagagggaattcttgttgcagacacaagttgtgttatgtctgctgtatgtagccttgtggcggctttcaaattgctgttgggaaataaatccattaatcagtgtggaccgcccccactggctctgcctggctataggctcctaggaggcagaatgtccatcttactccctcacctgtcttagtgtgtctgataatatgcccttgataattgatttttattttactttaacattacgctcctaaaaaataagatctccagttatagtaggtggaaatggcctcagagacctccttgtccagcccctagatgagggttctgagagccagagagggatggtgacttatcccaggccacacagaaagtcatcaaaaagctggaccaggccctggtttctgactcccagcccagggctctgacatccttttgtgcttttcttggctgctcctgttaacgagggatgcgaggaattctatttgggctttattctactgttttacagtctcttctgagtaataaggtcggcttgtttaataagttcagcttcaaagtaggtcagggattttatttctgtgcatgggccattagcattcttaagtgagaacacatttttttaaactgagaaaatatccgcggtgtagtcgaggcgctctgcgtctgtttcctaagccatgtcagatccttttataccacacagcttgtgtgaggggggcctgccagcctccaggcttcttgatgggggctgaggctcagtgggagggacaggagaggactgcctgctgtggagagaccccaggagctgcatcacacagagctcaggcgagaagggcaaggtgacttccgtgggcttctcaagctggtggtcacatcgaaatgaggtttgtgtttcgttttgtcagagataattttctgaaaaatccccaaacgctaggttagagatggtcgagtgctatgtcaagaaatctttcaaatctcttgtgacttaagtgctttcctggattcactgcccagtggccaagctggtagagaagaaatcaggggtcagggtctcactgctgttgtcagggagaaggatcaagacctggaaagatgggtaggtaggaaagcggcacatgacacgtcatctatttagggctgcttctgagaataatatcaattttatatttttagcaatgacccaaattagtttgtgggcttactttttttgtcaattgcttttaacctaaatgggactggtaacacaatcacagaaaaattttgtcgattcagaattcctttgtaaggcactgtacttggcgtagtgaggagtgcaagcatgattggccataatccctgccctgtgatgactctcttgtaggggaaaaagacacagacatgatactgacacaatgcagagggtaacaggactatgtagactacaaaggcttctagctgagtttcccacactaaagtctttcctgtgtccccttcatgagtttttcccatctgttctcttatgtgtttcatattattgctttttaaaaatgacacatgctttccttgatttttcaaatgagagtgcatattactatgatagaaggaagtctgtcttcttttacaagttaatgtacatttttgactattaaaataatttataagtaaatatccatgagtgtgcaccttatttaatctcatgtactgcactttggaacatgtcagggaggctgctggtctcctagaaggctttctcaagcagatgcaatattaacagggccttgaaggaagaaactatttcagcaggtgcaaaatgatcacatatacttgagatgtgatttggtgtatgtgaccatgtatatttcagatgtgatcagtgtaaatatgtgaggtggcattgttcagatgtgatcagtgtaaatatgtgaggtgtctcaatgcctaaggattccgtgggagtatagagtaagaggtaatgcactggtcccttgagactgtgctttttactcctttttaggttgtttgcaaagaaaacatcatgagactagatttcttctccatcgtctctcctcttcattgccaagtttttcaggcattattactacatcgttgttagttgtttgttgggttaatctatgcagagctatctgtaagcattagaaatccttcctgtatcccaagtcagggagaggcagataagaagggccatttatttgttcgttcattcattcattcattcattcattcatgtatgcattcattgttgcctctgatgctagagttagacacacagagatgcataagacatgaccacccaaagacccgggcggttggggaatcacctagaggccaagcatataatgagtgttcaggaaatctttggatgaatgaataaatgatgcctcccaatgtttctccaacttggctgcatattggagacaactagggaatttttgacaattttaacttcccgcatagattctgatttcattggtaagggttgagacctaagcattaggaactccaaaacttctctgcatgattctaatgtgcagccaagtttgaggccactggtgcaacccatgaagatattttttttagagtgggatagcttaatacaaaggacttttagtaaaagcagtacttggaccttagttggaaatggacttggagggacccaggcgtttgccatttaggtgtgggtacaatttagtcctttcagaggggtcctgtaagcattaagccctgcagttttcataatgacacacctcatttcttagagaggcccagtttatgcttcttgtctgtaaaggaactggttactttagcttttgaattgaccttaaaacccctaaatgtgctcacatcagccttctgggcagaacatcgatagttcagggtcaatcttgagtacacactagctgttgggaaaccttgttgggtttccaactaggaacatacaatcaaagttacatttcctttcctttaggggaatcaaaggtaggagaggaagttcatggggcaatttgaagagtccataaatgcctgcaagctgtgaagagctctataggaatgatacgattagagatcaattctttttttaaaaaaagttaatacttcgggaaaattgctacattaaacctgtgtgttctttgttatatgtggctttaagcagattgctttactgattaagatctagatgaggctttaggcaagaattttaagagaactttgttattgcttatatgtgttcttcctcaatgaagaatgatggcaatttcactgagaccatcaatgtgccccattgaataggccaaggtatatctttgaagcagagcatgctttcaaattcacttctcattttattgtgtacatgcccacaaaggcgagttttttccatttttcctacttttttaccaccccattgatgaaataaagaagtagattttaggacgagctttattattaagtgatgcttcacgtgctggaacatttgaattaacaatccttgctgtgtgtgtgaagacccagtgtctgccccatggccgtgtctgttttgtattgagttccatgtgtgcaaacatccatccatatcttactgaccatttccttaccggttatcttcctttcgagtaatttgcaagttaatgtcttccttgatatcaggatcatagaatatacagaggaaatgtataaaatggccagaagttgcgcatgtttatttaccactgtaaaataaaacactgggttaaccaaatgtttggacacacttgaagtgcattaaaatgcctcctttgacagtgtccttcaataacagtaacccgtatccttttatgtttatctgaaacagattcagccacatcttctccaggcttttgcctactttctaagcttcaccttcaatggtgattctgaaactgatgttaaaggaagtgtcaagtttttctgtttctttttttgtttatttgttttgtttttttctctggtgcatccgcttgtacctttttattatattaacttcaagctaagacttttttaagacacaaaaaaagtctggtaatattaagctacattattagctatctatggagtatgtttgatgtcttagttgtctatgacctatgttacaaaataaagtgccttaagaaacatttattatctcacaagaatgccttaggagctttagtgcagcttgatagctggttctggctggagtcactcagaaggctgcaagcagggtgtctactggggctacagttgtctcagggcctgactaggataggatctgctcccaagctcgcagagctcctggctgtcttcagaagactcacttcaaagatcattcatggccgggcggggtggctcacacctgtaatcccagcacttcggaaggccaaagcaggtggatcatgaggtcaggagatgcagaccatcctggctaacatggtgaaacccagtctctacaaaaaatacaaaaaattagccgggtgtggtagcaggtgcctgtagtcccagctacttgggaggctgaggcaggagaatggtgtgaacccggggggaagagcttgcagtgagccgagatcatgccactgcactccagcctgggcgacagagcgaggctctgtctcaaaaaaaaaaaaaaataattcatgtggctattggaaggctttagaaccttgttagttgttggcttaaatatgtgtttctttatgaaaccactcatgacatggcagagagaggaaacagagaaaggagaacgggagagaggaggagggaaggagggagggagggaggaagcgaaacagaaagataaaaagggagagaagagggaggaggaagggggacaggaggagagaaatagaggaaaaaagagatcaggggaaagtgagaagaaggagaaagagagagatgattgggagatagaaaaagagagggtttaggggagagggaagaaaagggagggaagagcagaggaaaaggggaaagggaaggggaagagagaaggagagaggcaagtaaaatggtagacttagtgtaacagaatctcagaaatattatcacatcgcttttgctgtactctgctagaagcgagtcactaggtccagcccactctctaagtgatagggttactgaaggccatgaatgacaggaggagggagtcactgagggtcattgtagaggctggaggctgcaggctgccaataattggtctttaaatatcaccacagcagtgatggtcttatgcagatgttgccagattttcttgcatgagagatatcaagttttagccctttgaagatttacagtagtaaaagtcacatattaagtatctaagtctatcttacattttccagattgacagctgcttactaatgaatcattaattgaacttggggtagtgatcccatcttcttccttgttaagttcaatgaagagactctgaaggacagtgctgtgttggatacatgcctcccagtttgtaggttgttccaaattgtatggtcttccatcttttccacagttttgagtatattctttaattttcttattttaaattaactattcatcatcctgaccgaaaacataatttttaaaatatcaaacttctaaaaaataaataccactaaaactttcaaaacaatccagacatatttttcagcatatctgttattcagaaactctatggtaggaaatagaatcaagcgtagttgtgtgtttgtgaaccaaatatttgactgaacaccatttcatcaggaatctgaatggatttgtgagctctgatacatttgagtataattaaaagtaaaaagttaatacagacctgacatcaaaagcatgatttctaactgaaaaattgataaattgaaccttattaaagttaaaatttttgctctgtgaaagctcaggcaaggaggatgaaaagataagctacagagtgaaagaaaatatttgccaaccatatatatgacaaaggactaatgtctagaatatatcaagaattcttaaaactcaatgacaaaacaattagaaaatttgcaaaagatatgatgagatatttcaccctcccgcctcggcctcccaaagggctgggattacaggcatgagccacccccgcctggccatgcatgatctttgcagtgggtcttctgaagacagccaggagctctgtgagcttggaagcagatcctatcctagtcaggccctgagaggactgtagccacagtagacatcctgtttgcagccttctgagtgaccccagccagaaccagctatcaagctgcactaggctgtacagatggcagataaacacttgaaaagatgttccatgctattagccattaaggtagtataaattaaaaccacagtgaaacatcactacatacttatcagaatggctaaaaagaaatagtgacaatagtagtacaggtgaggaactggaccactcatgcattgatagtagtaatgtaaaatgatgtagccgctgtggaaagcagtttgatagttctgaattccatatgacccagagattgaactccaaggaatttaccccagaaaaatgaaaacttatgttcacacaaaaacctatacataactgttcatggcagttttattttaatagcaaaaacctgaaaatagcctagatgacccttaacgggagaatggttaaacaacattcaacacaacaatagacccatatgtatatcacatgtaaactacacagcaacaaaaataaatgaactatccgtgcacacaaaaacttggactaggccgggcatagtggctcatgcctgtaatcccagcactttaggaggccaaggcaggtggatcacgaggtcaggagatcgagaccatcctggctaacacagtgaaaccccgtctctactaaaaatacaaaaaattagccgggcatggtggcgggtgcctgtagtcccagctacttgagaggctgaggcaggagaatggcgtgaacctgggaggtggaggttgcagtgagctgagatcgcgccgctgcactccagcctgggcgacagagcgagactctggctcaaaaaaaaaaaaaaaagaaaataaaataaaagaaaaaaaacctggagtaatttccagggtatgatggcaggtgacaaaaacagtcccaagagattatatattgtctttttggaaataacaaaattttagaagtagaaaacagattggtggttcccagggatgaatgatgaggtggggaagtggggagggaggtggttgtggttctaaaggagtagcgtgagaaacccttgtggtccactttaatttccttatggattatagtttgcctaccccagggtcagaaacattctattttatataaatcttattgtttaccttttacatataggtctatagtaccctggaattgactttgtttatagtataaagtagggcacaatgttgaaggttattttttcatatggatgcctaaataatcctaattgttttgttgagaatacacttctcctaccacagtgaagtgtcagctgtatcacagatcaagtgattatcaatatgtggatttgtttcttgcctccattgtttcttgaactgtttttcaatttcttaattactgtagcttaatacctcattttcttaattattgtagcttaataataaatcttaatttcctaaaaggtaagctctctaactttcttttcctttttaaatattgctttgaatattcctggccttttgcatttttatataaacttcagaataagtttgtcaaattgtctagaaagcctgacagatattttattaggatagcttatacttcaacataaggagaatatacaactttacaatattgattcttctaattcatgagcatggaatatctctccatttatttggatctttaaaaatgtatcccagtaatgtctggcagttttcagtgaagaagaatacatgtatatacacatatgcacatataggtatatatacatccccagatattttaatactttgctggtgcttttgtaagtaattattcaatttgtttgttattgaagtagaacagaatgcagtaaaggacataaagtgcgttaaccttatgtggatagctcaatgtctttcatatacatgtacacccatattaccatcttccaaatcaaggtgtaaattattgtggtacctagtttcatcatgtttcttcccagtcgactactccttcccctagaggtcaccattattatgatgtctattaccattgattgggtaaatggcactttttaaatttcattttataattgtttatatttaatctatggaacttttctaaattaacttgttaatttttatcataatttgagatttttaaagaattttctacacacacaattatgtagtctatgaataatgaaagctttattacttcatttccaacatttatttcttttatttctttttcttgcctcattgcattggctaaaactaccagtagaattggggaaatcagggaaaagtgtgtagtattttaccattgattatgatgttagagtaatgtgttagataccctttgtcagattataggactttccttctatttctagttttctaaaagttttatcatgaatggctgttgatttccatcaagtgcttcctcagcatctcttgagacaactatgtgatttttatctttcagtttgttaatatgatgagttatactgattgattttctaatattaaatcaatcttgtagtcccagcataaacttaatgtggttataacctgttattcattttatatatcacaggattggcttggtaatacaatatgtaggattttagtttacgtgtttacgagggagattggcctaaaagtttcatgtgatatctttgtgaagtcttggaatgaaagctatcctgggcttgtaaagtaagtttggaagtaattcttctctttggagtctctgaaataatttgtgtaaaggtgatatttcattgaaaccttttgtgtgtgttaaaattcaaacctacccaacaccttcaagcaggattttgttccaagatgttctagctaaagacttgctttctatgggcccttggaaatcactgtatatgtcattgagttccctgggcctatgcttgagaaatacatgaataagatgttagaaatacctagaacagtgcctgcaatgtcataaacaatatatttaccttttccttcctgtttcctcatgttctcttcctctacagaagcacctagaggcagtgacctgtggtagacaacagcatgaagccactaattctattcttggagcccagcgtccatctggcttagtcagaatcatggcttttggagacagggacagaggtctatgggaccttgcagaattgtgttgtttcgaagtcctttcccaaagagcagtgagttaggctgtgctaagtctctcttcaggcaagatacggcaggggcagaggcagccctaggggaatgagggaggatttggaagaagctcgtttttcagttcctttgcataagggagggtgtcatctcttaaactcttcccacaaactgagtaggctctatggataagcctcttaatccatctggacaccccttcctgacacttcagagcagtcgatacttctagtcatttctagccatttcagcagcttacagactaattatgcatctccccccttgcacatagggataggccaaggagaagaatttgcaaaataacaatatctctaaagccacagacaccttctgcgtaagcctttctttctgtggctggtagcgtagcaactgacgaagcttcctggactcaggttgccctgaattgcatgtttcttccctcactccctaccaccccctttctctctactttgtcatcttgtcatatttgttctgctatggcagctactgtgtttttcctccagtgctttctgaaagtgagttgcctgtcctggtgggagattagtggctaccacatgcataaagctgacattgattttatcgaacgtgatacatgtgatgcatgagcccaagatgccctgagagctcagatgctcagagggggcatctcaggaggctagaggcgctgggctgaatggcccattacaggagaaggctgtggaatggggagaaagaccagtgcaggggtccaaagctaatagccatgggaagaaaggaataactcacgtttatgtagggcctgtcatttttcaggcacttacacttgatcttcacaaggacccagtgaggtatgaccatgaccctgattttacatgggaagaaactcagccacaagggagttatatcacttgcttaatgtcacaccattaaataatagagattgcaaggcaacctctgtctgacccagtgatcttttactttccagtacacctcacttccctttgtaagtgaaagtgaatatgaaaatgcaaagggatgaagtgtattgggcatagtttggagaagctagcatagagtactggggtactgcacagggaaattgaggtagacttccacttatgtgggctgcgcaggcattgtggaggtcaaggggagactcacccagcatgttgaacactagctttgtactggtccatatgccttgctccttacattcaatccatgaccaagtcctgtcctttcagtctcccaacccaaccctcggcctagttcctctgcctctgcctctccagccccgtggccattacttgagttatgcctccatcatttctttcctcaatgtaattgacacaacttccttattggtccccctgtctgtttctctcccttagacccattattcaccgtgcactcagaggagttgtccctaaaactcttgtgcctacgtgacaccactgcttacacagcctcaggatgaagaccattcctgatcaggtcacttttgacctctctgattgcctttttgctggccccccacccctgctccccatcacctgtgtttcagcaggatataccatccgtgcatgacccagtcttgtctttgtgaataaccccacccttgtgcctgttagactctccttttcctttaagaccaagatcatgatttgattgctctaggaagccttccctaacatcctccatctaatttggatatctctccttgtattagtttttgattgctgctgtaaccaatcacaaagttagtggtctaagacaacacaaatttatgatcttatagcattggaggtcagaagtctaaaatgggtcagtggggctgtgttcctttgactctagggaagagtccattcccttgccttttgtagattctagacgtcaccagctttccctgcctagtggtccctttctccaccctcacagccagaacatagcatcttccaatcgctctctccgactctcctgcctcccttcttcacttatccaggatactacatatccaggatatgctccctactcaagatccttaacttaatcacagcttcagagtctatacaagttttggagtctatgtaagttttggggattaggaattgagcatcttttgggaccactattctgtgtatgatactgaaatgagagatttcccttatctcccttgcaggatgtgaaacgggtgtggctcactccttcagttgcccactgtaccagaagaattggatcacatgtgggctcaaaggatgagtgcgaggttttatccgtggaggtggctctcagtgagatggatggggagccagaaggggaggatggagtgggaaggtggtcttcccctggagttgggccgcccagtggcagattcttatctgactgcctccagctgaacccccctcagcgtccagacatcctttctcttctgtctttctctgccacattgttccattgtcactggtctgctggttccaacgttcagccacttgtatgtgtgcccactaaggtcttgggtttatatggggacaggattggaggtatggtgggccaaaaggcaactttttgggtgcgaaaacagaaatgtctgtgctgacttagctctgtgggtcttcaggcttgagggtggggcccttactggggaaccaccctcttctacccagtgcttccctgtcttctgtctgtatcaataccacacaactgtgtgagtccacaggactctgggcctgccacttcccagcctgtatcactttcttctatagctcattggtttctgcatccttccctagtctcttagtctcctccagggtagagacagttatttgctttgactccacatccccaaacatagcagagtcagccctcattacttgttagttaggcagaatatgatatctcccagccttcatgtacctgcctcactgtgtcgctgaccagggtgctgagaacagtggggcatcagctcactgtgtgagttaaaatcatggcctctagagcaagacagcctgagtatcccagcacactcactaattagccacatgaccttgggcaatttgtaccttggtctcctcatgtgaaaaataaagataattataatacctattgatataaatcacagtccaggagggaaaccctaaatcacaccaggtatttcaaacagagggtttttattgaagggaatccattacacagtgatgaaaggctgtcagtgcaaaagtgggacgctaaggtagccaaaaatggcaggaagtggtgaccacacctggggctggggtaacaaaatggaataggaggggttatggtacctagaagtctgtaggaggagcacagcagggctgattctgagacctctgaggagggagaccccacagattgtactgcagctgtaaggggcatggcctaggttatattagttccttcagaaagatactgtgccatgggtgctacaaagaccagaaaagatgaaggcctggagcgtagcagcccctgttgctggaatgatgctacaaggaccttgaagcagaaagagagcatcttcttccttcttccagcatcccagtctccatctgaagtctcccatcactaggactggaccaaagccagctggcaaggtagtttagagatgttgttagtggggtcccagctccagaattacataactgatgtaacagggtgggcttgaggcaaaaagaccagagctgaatactagcacactcctttagtctcctcatctataaatgcatactagaatagtacttactttccggtgtgatatgaggaataaatgaatttgtatgtaaatcccgaaatagagccaggcacgcagtgaacattatgagaatgttatttgtccttgctgcgtgacagtaataataacagctctcaccatcctgtgggtgtacagacgtggttgtctctggaactcttaagatccaaactggataaggcaagagtttctttcaccccattcttcatagcagggctgcttggctgaggtgggggaggggagtgaagggtgcccatttgtgaacccatgctgccctggaacaaggtgctcctgaagcatggcctttgattccaaagctttagaatccagcttctcctagcccctcctttggaggtgacagactcttgattcatgctttctgaggactcctgattagcaggcaaggaaaggaaggctcttctagaatgtttactctgctcttaattttgggaagtggcccagcaaagagtaatcttgaaaatgttgaggttttgggggataagggggagccggggcagacagagtgttgcagatcataaaacttcatctggtgctaagttgttattgaattatgcatttctgaatgacttcactggttgcaacatgatgttgttaagtagactgaggctgagctcttaaatttatttgctggtaggagttttggcaggagtacacactgacatgactgtagactgtcttgatcctgacacaggaaggggaatgcgtttgatgggatctttctgtctctctgttgggggggcacaaaataagaatatcagttaaggctgtcactgacagctgaatggctcatcggtggctggttgggaggatgatgatattagtagcaaagacagtttacttgttacgtgtaggaactgttctaaagtatcaactataataatttatataatctttatggcaattaccatgaggaagatgttactatatccccagtttacaggtgaggcagtttagacacaaagaggttaagtaactttccctcgttttcataatatgttagactggatttccccaaaaaacagatcctttagcatggatttgcgaatagtttatctaagttgtagggaacactggtaaacaggagacgaagtgagactgagaagaaagaaagccccttaaagagtgcactatgggctgagcagggtggctcacgcctgtaatcccagcactttgggacactgaggcggatggatcacaaggtcaggagatccagaccatcctggccaacatggtgaaaccccgtctctaccaaaaatataaaaaattagccgggcatggtggcgcatgcctgtagcacctgtagttctagctactcaggaggctgaggcaggagaatcacttgaacccgggaggcggaggctgcggtgagctgagatcgcgccactgcactccagcctgggtgacagagtgagactctgtctcaaaaaaaaaaaaaaaaaaaaaaaaaaaaaaaaaaaaaagagtgcactatgagctggaagtgctagaggatatctggtgctcagtcccacccaggaccatctaaaagactgaataaagccaccccattgtcccactaggggtcaaggaaacctggatgtttatccaccaacttccatccctcactgggtaagggctgctcctgggagtggtaacacctgggcttgcgggtaggtgggaagtgcaatgcctgtagccacagagcaggcggtattgacacagctgctttctaggtaaccttggtgtcctcatctgtaataagggtgtagtactgtctgctttgtgttgtcactatggagagaaaaatgaggaaacaggtaaactactgtgtggttgcaatgattagaggattatctgaaagtcaagtgtcaaaactcacagtggaggtctttgagggggtcccagaggtagccaggatgtctccttgttagtgaactattggtgaggaacttgctgggaaaatggatgtaatcgtggttcttgactcctgctacctgggcagataggaggggagattgactgctaaacactcctagtgattgagagcagagaactgcaagagaggtcacatccagatgtaaaagcttgaaatatataaaaaccttacctatttcaaatgcttatatttataataagcaactgatgcaggtttactaggcatttgtaaaaaaatcaaataagaaacagaataaagaaaaaatagtacctatattctcataaccctaagaaaaacgtcagcgttttcatgtatttaaatctagatgttttaagcttaggtagatgagatttgtttgttgaatttagttcagcaaagtgaaggagagactttttcataggaatttatgatgtcccttttcaggatgatggccgaagctaaagttaaccgttcataatgaaattgcttgtttttaagcattccctaaatgctgtgtggatgaaaggcatgccattctgccccttcttacagattgggctatgtgttcacttcagtctggcacaagatcatgctcctcttctagactcacatctgagaaaggagggtcttgtggtagctaaccatctcataggactgatcattcttatatcacaattcccctatgctagaggtcatgattttgattcatcacaaggcggactagggtaaatcttcaagcagtttttctctaagggaaggcatgcacatagcattttcttctctgcgttcttcagaaactgagagcattttttctgctggctttgaaaatgcaccacaactaacctcctataaaactcttgggactggaaacatcccccttaagaccttttgtgtataccattgtctttatcataatgtaccattgtctttatcataatggttaggagtgcagaccccgggcatgttgccttggcctcagtcctggattttgaatgactaactgtttgactttggatgggtatctacccacccataaagttgctgtgaagactaaatgaatcaatactgtagaacactaagggcagtcagaggtgtctgaaagtgtgcagtacatgggagctgccccatggtgttatttgtgattattctcatcatcctcttcctcatcacatcccagtgtttgaaactgtaatgataaagtctggaaccagagtttttagtctttttattttgttttgatagatatctgttattttttctgaaggcttatgggaatttttctttagttttatatttcaaaaatattgccagtatgtacttaagctcaagtctcatcattgattttgcctggaacccactgtgctcttcagagtctgcaaactcaggcctttgggtatttcagagaagttttctttacatatgtctttgattgttgctttctgtcagttgtttgatgtcttctctctaaatacttccaatcctttgcttagaggtgcattcagtattctctacaacatcgtacttcttgttctttttcatctctttgttgccaccctcaacctttcactttgggaaaacttatcaaatattttttctacccatttaagtaagacatcagatatttattgaccactggctgtatgtttggttagggcacaaagactaatttttttttttttgagacagagtctcgctgtgttgcccaggttggagtgcagtggcatgatcctggctcactgcaacctctgcctcccaggtccaagcgattctcctgcctcagcctcccgagtagctggaattacaagtgcttaccaccgtgcccagctaatttttagtagagacagggtttcaccatgttggtcaggctggtctcaaactcctgacctcaagtgatcctcctgccttggcctcccaatgtgctgggattacaggaatgagtcaccgttcccagccaacaaagactaattctgattggcacctactggaggatttgatgctatatctacttaggttgtgtccaaggactgtgagcccaagccagggaagaatgagaaggctgggctactgccgattgctcactgttagggtagtcattcagtacacatagaatccctgtggcccttggtagagaaaatttagggacttttatgacttgaatctttcattgtcaaggtaaaataaatttgaggaccatgaagattgagtagagtcacacatctggctagtggtaagccaaggtcaaggaaagcttgaaccctggccccaaggtagtcctttttgatcctcagtccattattgtatgaaaacagtgttgcgcataaatcgtagaaagtttaatcagcattgaacatctactctgtgcctagccctgtgctacacgaaagtaagtcgtcatgaagcagttttgaaaagaaaaataggcatggtttagttaaaagtaattgaaggctgggcatggtggctcaagcctgtaatcccagccctttgggaggctgaggagggtggatcacctgagataaggagtttgagacctgcctggcaaacatggagaaaccacgtctctactaaaagtacaaaaattagctggacgtggtgacaggtgcctgtaatcccagctacttgggagactgaggcaggaaaatcgcttgaacccaagagttggaggtttcagtgagccgagattgcaccactgcactccagcctgggtgacagggtgagactctgtctcaaaacaaaacaaaacaaaacaaaacaaaacaaaacaaaacaaaacaaaaaaaacaagtaaaaggaaagccattctagttgggaaaaatggcacagacaaaagtctggaaatgagaatggcacaaccgtgtttctgtctgtgtatgaatgtgtttgtgttggtggctagggttgggtgggtggaggcattcccacagacctggagggtcagtgaatagaaaatgcagttaaaagggtgatcaggtggggtgagacgtgtggtgtaaagtgttggaggctaggttacactcaccttaatcatatcaaggctcacttcacgtcttagtaacgtttggtttttctcaaaacgtttgatttctatctagagcagacagtacatgcgcacagctccatctccagctatttgaaacacttttactctctgtaggaatttctagggagtcaaactgttacaagtgctcacagcagggaaaagaaagacagaattgttctggagattgatgcctgaggatgtggcagaattacaggaaggggtcacttcaccatctacatgttgaaggagagccttggaagctcagggccgctgctgcccaggtctcatggatggctcctggcatccttgtcctcgcagcgctttgatgcctggctggaaggcactgatgtcatctcccagctcagccctcagctccatgaaggcaagacttcctcctccttaatttagttgcaaactttgtgagcagagggtgctgtcagatgttaaacacttactcctggctttgcacagatgatggtgtggagtctgttaagagggcattggttgtgttagaagtgaaaagcctcatggataagaaactggtgtgtgcctgaacaacctcttgtttgaaaaactgttaggaattcaagcatctgatggtgctgataagagggaatggtataggagtaaaggctcattttctcccaattttctgaggttccctttcaggtaattagtggcattctcttcatccagtgagtcacatatccatatttttgttttttttaacttttaaggtatcacttatatgcataaaaatacttctgtttaaagttcacagtttaatgagttttacataaccccagttaagatacagaaatggttataacctcccaaatttttcttatgccttctttcaggcagtcatctcccttatagtaacactattttgatttctgttatttaattacccaaatcaatatatagagaacattctaacatcccagaaacttccctcaggctctgtcccggtcagtacctgcccctcaggtcactatgcttctggcttttatcaccatagagcagtttttcttgttcttgaacttttcacataagtggggtcatcatgcattcttttatttttcttttgcatgaatttttttgagatttactcatgttgttgtgtgtgtctgtgtctgcagcttgttcatttcttgctgagcagcgttccattgtgtatatgtgtatccctttatggatccataagctcttacctaggtctggctcccagggcctctctattctcgaatgccctccttctcaacagcttctgagtcagcttccttctctcctgacttctctttgtcaatcctcgagtgaaggctggaaggggagctccatgcagccaagattgtgtctgtgcctaggacagtgtgtgaccagcagcagggactcaacattcatagaacgagtgaatgaatgagtgtccagggcacatcgtttgaattgttgaccagtgtagcccaagcaactgagaactaggggacccccaggaatttttctttgttcatagactcaacatgagtggtcccagcagaacactcccctaagtgctctctgcaagagcttccctaacctctagaccagattgggtcctttcacaggcttcaaaactgcctctgccacccgcatcatgactttactacactttgttatcactgatttacttggctgcattaaatttcatgcgctcagtgctctgtctggcaaatgagatacacaggggtttccttttcctccctgctgactctagccattggactggatggccctgtacatttcctatactgtcttcttgaagagttcatcttagagatagagaactgctataaatagatagggtttgtctatgtatttttaaaataatgtgctgcttaccaaaaacattctgtgctatatttttgcttctctctctttgaaccaccagtacctgtgccttctaaacaatgccaattatgaatcaatggatcactgaaaaaagaaagaataaagcacacaataatctgatggcttccttggtgccagatagaggaaacaccgtgataaacttacatggtctactcttgaggggatggagagagagataaccgtgaggctaatctgcacacaaatgtgtgaagtcgcaagtcatttgagatagggacatttatatactcaaggggatgtttgttactatacttgcacatgccattagaaatacatgaaaagaagctaaccatttggaaagatttaatactttattttctttctggtggtcagcaactgaatactgctgtctgaaataggagagcagaaaaccatggtgaaaagtcaatggaaaagaactaaatggggccactcactcagcctccaaactattgaagtctgcaactcttaattctgtagaggtctagtctgtgaataattatattaaggaattgggcagagtcatcacagagctgcaaaatatcacccctggggcctcattggagactgatgggagctctggagagttgataatggcaatcaaaggttccatatatttaacatgcacaaaggatgagcttagaaattatctgcctgccaacctagcttctctacctggaacaaattatccaaaaatcaatttgcaaacacctttgagataacaaggtcttgagtaataacctccatggctttgtaaagaaaagcatctagcttgactaatctgcttaatttccttctctgaccaaatggcaggctataatagaggcaatctggagttgtcccttaagatttgcttcgagtcacactgagaaaatattgtccacccctgtttcatagcaattattctgtttctagagaatctttgcttctaggtaattaattggaagggaaatgcttagtgcgtctctatctcaaagcccttacctgagttccaagctaaaatgtatacctaccttctatccatgtgaataacccagaggccctctataagtgaaatattctcaaacaaatgcacattgtattctaccctcatatgcctcctctgtgcctgccctttctcctcttccttgttctactcttcatttcctcttgttcataccctttgacatataatcccattcctcgcagttggttctaagaaaacatgagataagacagactgaagtctttgcacaaagatgttcattgcagcattatttaccatagcaaaacatgaacaactcatgggtccagcaatcagagaatagttagtgtgataacctgatggattgttatgcaaatattaaagacaatgatgataaagctcaagcagtatatgaaaaaaaaaatccttacaatataagtgaaggaagaaaaatgaatctacattgggtctatgtgttattataacaacacaaaaaatgtgtcagtacataaatattggaatggacatggaagaataaaaatggctatgttggatgttagagatattttctctttcttccatttttctccattttcttccatttcttctcatattttctctttcttccattttctttattgttctgccatttttactgcaaataaaaataacaaatatattcagtttgatttttttaaagatgagtattaagaggcagacagctttccttggtgcaagttggtccaggaaggcatgcggatataagttttatcctacactaccttctccatgaccttggttaggtgacctgatttcttaggttgtcagtttttttttttttccccattaaagttaaggtgataatgctgtcccaagaattacatgaatgatacgtgtgagattttaaagtacataagaagtacaaggtaagtgttaatttttgtagctttgccatgggctaataattgcaaggaagaggctacaatccaagcctgctgaacctctggtctacttagctgactgcgtggaactcagtggaagagaggtggcagcacagagtagatgcacgataactcagcacaacttttcctttaacccctcattcctgctgggtctgctgtgacccatgactttctctgctggaagaaacctgctggggttgaggcagaagctgaattcttgctgtgccatcattctttttctacttaggctcatatcactttttggaaagaacttcactaacaatctgtgtgttctatgtaagaaatgtttatagacctcaggctcccctggttttgtgccaaactttacttcagcaaaagcaggttttcctttgaggctagaaaacagagtattcacccagcagctttgctgtgttctgggaaaaccatttcctcacatggccttctttctttcatttctttaaatgaaggagataaggtaggcattgaatatagctattgaagaaatactgattcaggtacttacatgcaaacccttaaagtagggcatgaatgggatttaaaagggttttcaggccaggcgtgttggctcatgcctgtaatcccagcactttgggaggctgaggccagcggatcacctcaggtggtctggagttcaagaccagcctggccaacatggtgaaaccccatctgcactacaaatacaaaaattaaccagccgtggtggcaggtgcctgtaatcccagctacttgggaggctgaggcatgagaattgcttgaaccagggaggcagaggttgcagtgagccgaaatggccccactgcactccagcctgaatgacagagcaagactccatctcaaaaatataaaataaaaataataaaataaaacaaaaaggggtttctgactattttttttgtggctacatcaagaattctgtcccttgtcgtcatgtgcttgtagtctgctctgtaaatcatttgaatctgacagtcctttttgattgcttgtcttacagagcctcccacgcccattgctcccccagagctgctggctgtgggggccacatacctgtggatcaagccaaatgccaactccatcatcggggatggccccatcatcctgaaggaagtggaatatcgcaccaccacaggcacgtgggcagagacccacatagtcgactctcccaactataagctgtggcatctggaccccgatgttgagtatgagatccgagtgctcctcacacgaccaggtgaggggggtacgggaccgccagggcctcccctcaccaccaggaccaagtgtgcaggtaagattttttttttttcccaggctccattatgagaggctgtgctattgccaagactggctttcctcttgccttcctgtgacagataattccgaattttctttgaatgtgaatgtgcttcctattgtggataaacaggatcaaggccttggggttttttttgtttgtttgttttttagaggaccttcttgctgtggttgcatttctaggggctttctagctctgactgtgattctaagaacttcctgactttagctgggtcacgggaggttcctggatctaatagtgtttctgatgagacacactggctctgtgtcttccagaactcctggtgccatttgtatgtctgaggctttctaatgctaataatttctccgagggctcttggttttgtctctgggggccctggccgtgtttctctgagggttcctggctctgtttctctgagggctcctggctctggttgtgtctctgagggctcctggctctcactgtgccccgtgaacgcttcatttagactatgtccttgggggcttctggttttggttgtatctttaatgagtttctaattctaacattgttcctgaggctccctgagctgggcctgtgacccttggttttgaaaattttcttgatggctcctggttctagaattgtctccgaggggcttctgttgccaaccatgtcttaaatgcctcctggctctgacagtatctctgaattgtttctggaactaccttagtccctaagagcttcctgcctctgtatcccctggaggctcctatccctacctaagagtctgggttgggactattcctctgaaggtcctctggattccactctatctctatgggttactgactacacctgtctctctgatattcctggatgccatgtaagagtttgctggctgagattgtgtctaagaggggagagattctctggatccaactgtgtcccaggcctcctggcttctactgcatttctaatcaggggctattggctaacaacatgtgtctcactgtacctctgagatgatctggctctggatgcaactcaagaaattaaactaacttgctctttatttgttgcaaattaccttatttatgttatatctttttttcacaccaagtaaacttttgctgtaagtacttacattttatatatgcacaaaggaatagagactcaatacttttaaactttttgtccaaagtcatagaatggccagtggtacggtcaggaattacacttagattttctgactctcagcttttgacttttggccacatcatgatgaataaaagagagagagagagagagagagcattgtatatacagctggggatgttctagtggaggcgggtgtggctcaggggagcaggcagcatgggtttcagaaaacaaagaggagtcactgagggcatctgggtggaggggaaggacccatcagtacaggaaccatggaacaaacagcaagggaaagtgcatacagctctgccatgacttgacatataggtgcctaaaaatcaccacactatgtcaagttacgaaatgaaaaccacagggattatggaaaaaatggggctaggggccatattcatacttccttagtgacacatcaaaaaagaggggaatctagtaaaactggtggcacaattttatgcacgtgaaatggctaagaaatgcatccatccaggtggaatattcctaacctgaacctcggaaatccaaaatgctccagaatctgaaacttactgagtgccaacacgataccaccaatgaagatgacattgttaacactgcagaaaaagtgcctgtagatgacatggcaagcattggtgatgagcttatggaaggactggagcagtatgcattcatagcagaacaggaaaccaggtcaatttataaaatcagagacgtctaagacaaaaatcattgttaatgaggcagatgactctggaggaaacatttttaaaagccatccagcagaatgcctctttatccctagaggatccacttcctggttcctcaactgcttctgatgtttgttctcacctaagaaaataaaatgtggtgtataggaacccttcatcaaagcacaacatcacagggagaggactgaaagccaggatgtttgttgctgacattcaccagctgatccaggtatctgctgagtctactgtgctgctcagttaacctgaacacattaatatttcacagtattaatgacatatcatttattcttttttactgttaagcacttatgtgtgaataagcttaagaagatgattgcttatcgatagcatatacatttggagtcaggaattatggtgatgacagacaagcacagagttgtccacgtaagtggctaagataattacacctctgctttctgatggttcgacatacaaaaacttggttcatgcacaacattatttaaaatattatgtaagattgcctacgatatatataaaacataaatgaattttgtgtttggacttgggtcccatccccaagatatcgtattaggtataggcaaatattctgaaattcaagaaaatctgaaatctgaaacgcttctggtcccaagcattttggataagggatgctcaacacagatggtatgttaccttgaaaaagacctgaagtttgctgtggaagtgggcatcagggaagttgcagcctgtgagtgacttgcagcctgtgagtgactgtgaagtggtggaaggaaagctgtctgaaattggggaaaaaggtgtggctcagaacacaggcagtgagctgacgggccaggtaggggttggaactgtgtgtgttgcatgtattcgtaggtggctcagttctgctgggtgcaggtttctccttcactaatgtttctcacatacaaaatcacacataagcaaatgcagaattcgtgttgtgctcaaattgccctttcatatattaattgggttggaacaaatttgcgttttcaaagcaagagttgtagtggaattagctgtaaccattcttaagtatctcagtggtgtatcgtggtagtatgtaacccaggtatttttgttgcttggaaatattccttgtaaggttattgaaccactatgctgaacagagatgccattttcttgattattttcaaaacaggcctttggtaaaattcctcattgaaacctgattatgaaacttactactttaaaaggacataatgatatgttactaaactgggtaataccttatctcagctttgcaatgcaatattcatccataaaaataattgatttgatcctgctgatgagacttctctctttccacagggtaaatgtaagagtttccagggtttttgatctttataaatgatattcaaagtactttagcagcccccgtggacttatttgctgatgatcatataatacattttgaaattcaatcgcaagatgatcatctcaataaagatttacagtctattgcaaactgttgccatgactgtgtaatggattttacatgttgaaaacacaataatctggctatcaatataaaaattatgagttggaatgcaattgtggtattttatttttaaaaaacgttggtgtttaagttacagctaaaatcttgaataattcacattttacaaaatgtgtcatcaagaagataatcttccttcccgcatcgccactgatggtggaatgttttttgcctcgtaattaatttttaagagaattccagggctggtatctatttgtaggtggtgtttattggtgttggtagtctgagattttcctccttttcctattctattattaatcacgctggaaatgtactcattattttacaaaacagaaagtgagagagtatgtagagtggaaggtataatttctgcccagaggaatttacaggctgggttaggattccaacaaaacagcaaaaaaaggtaaaacataaaggcaagcattgaaatagcatgcttcatggaggaaaaacagcgtcagcatggaaagagaaatggtcttagaatcatcttgggcggtggttctcaaagtgtggtccctcgaccagcagcatcagtattgctatagactgaatacttgtgttcctttaaaattcatatgttgaaattctaaccctcgaaatgatgatattaggaggtggggcatttgggtactaattatgtcatcagggcagaatactgatgaatgagatcaatgcccttacaaaagaggccccaaaatgctccttcatgtcttctgccatgtgaggacccaggaaatgggccctcactagacacttaatctgctggcaccttgatattggactttccagccctcagaactataaaaagtaaatttctgttgtttataagttacccagtctatggtattctgttactgcaacctagatggattaagacaaatattcccctgggaacttgttagaaatgcacattctcagacctgtcccccgacgtaataaatcagaaattctggggttgagcctagaaatttgctgtaaggattccactgagtgatgtcatttcatacccaagttttacactaacttatgtatagtgacaagccaacatggctctttggaaggatgttcattccatagcttggtctttgcagcagctctgagatgtagatgggaggaaaactgagactcagaatagttggatgaaggtcaccaatcggttaaatgctaggtctcttggccagagaaactcttcaccacaggacttgatggagtcttcagccctggggacctcctctgcccacaagtgtcctcttgagagtggcattgggtagtaaggaggttggtgactatggagatcagctgagaatgaataactactacacaaaagtttcactcctttctatcaaacatttacttagtcttttctttgtgccaaattctgtgctaggcactggtggcagaggttggcttagtaaggacatgctagtagcaggcagagacttggcagcagtaggctacaagcttgggcgtagcacaagaagatgctagagaggcaattcagctaaggcaggtggggatgcattctggctctgccagttttgagaggtcactgattaagaaaattctggggtactaagggaaggctatccttcccttaacccaaaggatacctcctccttaacccttaagggggagattgtcaagtgtttgcctgtagcgcagcatcccagcccagtaggctggagttcagagcaagactcccagccagttaaaccagaaactgtacagatgatcagataggaatcgagggatgtggggttgggagtagggagtcaaaggtgatactcccatgcttcagtttagatggctgagagatgagtggttgtattagtcagggttctttatagggacagaactaataggacagatgtatctataaaggaaagtttattaaggagtattgactcacacgatcacaaggtgaggtctaggctgtctacaaactgtggagaaaggaagccagtccgagtcccaaagctgaagaacttggagtctgatgtacaaggacaggaagcatccaatatgggagaaagatgtaggccagtagactaagccagtctagtctttacatgttctgcctgcttttattctggccatgctggcagctgattagattgtgttcacccagattgagggtgggtctgcctttcccagtccactgactcaaatgttaatcttctttggcaacaccctcacagacatacccaggaacaatgctttgcatccttcaatccaatcaagttgacactcattattaaccatcacagtggtgaaacaattttctgagccgaaaaacacaaaaggaaatgagctcaggtctgaatatgttgtgttggaggtgaagatgtatagcaggtgatgggaatatataaatctggagctcaggagagatcagcagataactgcctcttccatgcggactacctgatttcacttggactttaggatcaaagggacttcttagtactgatgaaagcaatttaagtctgtgtcttcatgctgttctgttgagataatccatttcttatatttttatttatcattttgtttcttttccttagtttaatcattcaccatctttcatgagatataggtatgagagcaaatgcgatcatgtatatcaaactcaaaatgttctttagctgcctatagtgaaccaaagtgttattggttgctgctattgttatggatgctatgattatgaataattatatcaaaacaggaagtcttccttgtccacttctcagaactaattggcatcttgaaggtggacccatattcttttgttgttcatcatctcctggaaaatcccatttcagagttcatgctgtggtctgggatctcagagactctcttgtctagagcattgtgtggtttcctccagcacatccccaacagcagactttctgtgataggagttgggtcttagaattgctgtgtgttgcccacccagcctcaccttgaatgctgcctctgatgggaagtttacactcttccatggcagaccatttcactgctggagatctcgggtggtgactattatcctctatccagtgttagcttggttatcgtacagctctggatggattatacacagagtgtccattaggtttaaaagagtgggggcagtaggcaggctgctagcattaactattgggagtccacagtgagaaccaagggcagtggatgccgaggtcagtaactggagaaagcaggtgaggtgacaagagatagggacaccacatgggtccaacttggccctgtacctctcctgcaggtaccactttcaatggcttgggtaccagcttgttggtgtcttaagactatcatctagcattagatagaagaagctcttcctcattgttaccctcaaataggcctccttgaaacacccacttgtaagttttgctcccaggttttcctcctcatctcaaaaacaggtcttcagccactcagttgtctcacttaatccccagacattgctttcttttatccccccaaacttcgcttgacgcagaccccaggccactccgattatagttacagaatcacaaatcaacaatccagcaagtcacgtaatcttagcccgtcccccttgcgtgtcaatcaaaggccccttgcctgggaacccacttcattgtagtcttgcggagtcccagctctccaagtgaaaagtggctttgtacagccagagacaccacatacgctgttgatttggagggctctcttcctattccctccacctgagggttgattgcatgttctattttatttacatatttatggatttctacttgcagtgatatgtgtctacctctctcttttctccagggggataaaaaagataaattcaaattgctgggctcaatgaagtgagagtagtcattagaattgaatgaaaaggatagaggctttagagccaaaaataatctggtttttatttcaagctgggcacttgctggctgggtgaccgggatgtgttacaccatctctctgtgactcaatttattttcttccatctaagggatattataatgcaccattttgttggaaagcttcagtgagataagttatatgccttgcagagaaccgggaacttaggggccctttaataaacattatttagaaataaatcttaggcctggggaaaggatgtcagaacctgatttccttcactgtagcatgatggaccctgttttaagaaggatttctctagctgctactctgtgtactttcttagacagtggtggtttagcaacaagctctgatcactgctgagaaggtaagacatgtggctgtgtgcatgttgtggagtcctcgacgtgtagctgtgagggtatttcatgatatagggcacggggtaagggggatgggaattgtcctttttataattgtctctagtctcaggtaagagggagaaccatgttacgcagatgcttctctctttgaggaggccaaggcttgtaagaatgaggcctttcaagcccagagcaaaaagggattggaagtgaatccagactctctgcaataagcagcctcaggtggtctctgtgttctctgaaaagcctgtgggtcccacaggcaagggtctttcagggcaacatgcagttctaggacagagtagaggcagagaattataaaaagaggtaattgaaggtctagaaaatagaacagcatcacttaactagtctcgtgagtttttcttcttcatttctctatgccttggcggcaccatctataaaatgggaggaacataacttggcctaactcttagggttctgaattagaagtaaaatgggacatccttctgggcaggagggtagtatgaacacagacatctaacctccatctctgctgtactgtaattctggtgagatgatccataaatcttcggggaacatggaaacagtagccagtagaaatgaaaatggactcactatcccacccagaatcaaagccatagagttaatggattctaaagaccaatggagaaattttcaagaccatgaggatctagggaaggaggggactttcatgcatgccacaccatgctcgaagggacatagttgcttgtgcagtgcaggtgaacctagattgaaggcagtcacagaagatggattatgaccagcacttcctcaaaaagatgtggagaaagggttctggcagttcttgcatcacctaccgaacttgttttgctgctgctgcactctctgcttcctctgggttgtaggaccacggaagagagatgaaagctaaagaagggagaaaacctgctctgatcatactcggttatggagcctctgattgagacgccataagaattatctgggcacggcgtggtgactcacgcctgtaatcccagcactttgggaggccgaggcgggcggatcatgaggtcaggagatcgagaccatcctggccaacacagtgaaaccccatctctactaaaaatacaaaaaaaaaaaaaaaaaaaaaaaaaattagctgggcgtggtggcgggcgcctgtagtcccagctactcgggaggctgaggcaggagaatggcgtgaacccaggaggcggagcttgcagtgagccgagattgtgccactgtactccagcctggacgacagagcgagactccgccttaaaaaaaaaaaaagaattatccgcagacggacaagcacctgtgagggcataagatgttcatctcctcttcttgcagaccctctctcccctcccactgtcgcacgatgtctactgttggcaccattggagtccctctcccttggcttaagaaagaggcaaaacataaagctctctctctttaaacctataattcataatcccagagactcacttcccctaacccatgaagtctcattattgtatgagctgactgtagtgctgggagggaagagtgagagtccgcttgggaacctcttagtgttctctggaagaaatagctggaagtccctcaggtcttctctgtagaaggtggcagtgtttattttgtatgcttattggttttgtagtcttagataaaattccaaagcaacaggaaaagccctattagacatccagttgcacttttagatttttctgccactccatgctccttagggagccagggcctcctagaagatgaagtgcaatagtgtaacttagcacctcgtttttaaaagggaaaaaatcaattgtttaactttttttctttccccccaccacctacttagctgtttaggaatgaaagtataatctttaccttctctccaccagacacttccaacacagcaagtctgtctaactatgtgttacttagaagttccagagactgaaacttgaagcaaaccaggcacatccagaattctatcccaataggagattgccaccatttacaacctcactctgcccatgatggcactagtgagacctccggatagataagaaatctgaaaagtcacatagaccctgcacttcctcgccctctcccctgcgtgcccttcactccaagccttcctttaaaagcctctgctttctgcctggaagcaaagtggcaccctgaggaaggagactgcactactgcccttcagctagctctggaataaagtcacttttctttctaccagatcttgctcttgttaattgaactccgcaagcagcaagcaactaaatctttattcagttacaatagtaagtcaacaagtaatccctcaacttcttctaaatttcagggttgaaatttgaagaaaaagtgagtcacagagaagcattaaagatagtaaaagctaacagtgtttatcaagctctctggatttttaaaaaatagcatcccaaatatattaaaattagagttcaatcactcttacagctctgtcacacttgagatgacaatgtaaagaaagtgtatgattatagtgatgaaaacagtggctgccaatttgaggggtatctactgtatgcaaggcttatagtgttgagcttgttttgaatattttacttgtaattcttgcagcaagcttgtgagggaggtataattcctccactcactgtctaggaggtaggtgacttgcccaaggccacacacttgctcaaatggcccggatgaaaatggaacccttaactgcacagctgcaaagctctagctcctgaaatccagaatcattatcaatgcataatgcaccatggcccagttgggtgttttccaggaatacactgatgaaaaatgttgaatattagaaaaactatggatgtaatgcctcatattagtaggccaaaaaataaaaatcatctgagcctctcaagagaggctaaaaagtaatttgaaaagattcagccttcattactgatcagaattcttagtaagctagaaatggaaaggcaccttcttatttccagaagaaaacgttcttatagcctcaatgcctaagagaataaacttaactgaaaaaacaagctattggaactactaaaagatttcaatgctatggtcagacacaaagcaaataaacaaaaataaatagccatatgccagtaataaccattataaaactataataaaatgtatcctattcttaaatgtaattacagtataaacacttaagtgtaagctaagaattgtgcagcatgtatatgaaaatacaaacacctacaaagttttattgaggatgagaaaacaagacctgaacaaatggccatatgtcatgttgttggattagcaaatttaatattgtgaggatagcaatccttcccaaattaattgatgggtttaatacagttctaatcaaaatcttaatgggattcattttgaaacttaaagtgatttaaaagttgatctgaaagaaaatacaggagaaagaagtcaagagcacttagaaaaagtgattggagggtttctctgtgaaatgtcaacatttgtaaaaactataataattaaagcccagaaatgaatacagtacatagcaaaactgactttaaaatttttttttgatgcatgaatgaaagtatatttttttaatttttgaaacataaaccctttcacaaaaataaataggcattcaaatatcccaaataaatttaaaagaaactcatacatatagagtgccaaccacgtgtcaggctctgggtagcactttacaagtatggaattttcataacaggtcctgtgtgattggtcttataaacaacttatgatgagatgttacataactaattttattttattttcttctttctttcagcctttattttttatttttatttttttattatactttaagttttacggtacatgtgcacaacgtgcaggtttgttacatatgtatacatgtgccatgttggtgtgctgcacccattaactcgtcatttaacattaggtatatctcctaatgctatccctccccctccccccaccccacaacaggccctggtgtgtgatgttccccctcctgtgtccatgtgttctcattgttcaattcccacctatgagtgagaacatgtggtgtttggttttttgtccttgcgagagtttgctgagaatgatgattttcagcttcatccatgtccctacaaaggacaggaactcatcattttttatggctgcatagtattccatggtgtatatgtgccacattttcttaatccagtctatcactgttggacatttgggttggttccaagtctgtgctattgtgattagtgccgcaataaacatacatgtgcatgtgtctttatagcagcatgttttataatcctttgggtatatacccagtaattggatggctgggtcaaatggtatttccagttctagatccctgaggaatcgccacactgtcttccacaatggttgaactagtttacagtcccaccaacagtgtaaaagtgttcctatttctccacatcctctccagcacctgttgtttcctgactttttaatgattgccattctaactggtgtgagatggtatctcattgtggttttgatttgcatttctctgatggccagtgatgatgagcattttttcacatcttttggctgcataaatgtcttcttttgagaagtgtctgttcatatcctttgcccacttttgatggggttgtttttttcttgtaaatttgtttgagttcattgtagattctggatattagccctttgtcagatgagtagattgcaaaaattttctcccattctgtaggttgcctgttcactctgatggtagtttcttttgctgtgcagaagctctttagtttaattagatcccatttgtcaattttggcttttgttgccattgcttttggtgttttagacatgaagtccttgcccatgcctatgtcctgaatggtattgcctaggttttcttctagggtttttgtggttttagatctaacatttaagtctttaatccatcttgaattaatttttgtgtaaggcgtgtaaggaggggatccagtttcagctttctacatatggctacccggttttcccaaaaccatttattaaatagggagtcatttccccatttcttgtttttgtcaggtttgtcaaagatcagatagttgtagatatgtggcattatttctgagggctctgttctgttccactggtgacttttaaaatttatatgacactttgggaggccagggcagaaggatcacttgagcccaggagttcaagaccagcctgggcaacatagcaggaccccagctttacaaaaataaaaaatttatatgaattgaaaattgcttatcaaatagtacatgattaataaattgtacatggtaagatactttgtaaaaaatagaatttattgcatatattaccatgtgctaattaaattatgggtagtttaaaaacttaaaaggcaaaactagaaaaaaataaagaaaatatcattcttttattgggagagactctcagttcattaaaagcaagcaaatacaccattgaggtcatggtttacacattttactacatagaaagacaagaaaaagaaaaatcttctatgccatgttaactaaaatcaaaaagcaggttagtaaactggtgtgggaaaacatgtgacaaaactgagaaaagggagataaaatatctttacacataaaaagctctaactttaaaatgtaatcacattgatagaaaaaaaggctaaaggcataaagaggtaattgctaaacaaaatatgaatagcaaaaagcgtattaaaaatgtccagtgttacagatgatcaaataaatgcattttatctatcatattacctacctatatattttttaaattgttaataagcagtattggtaaggaataacaaagcaggttcttacaggcatttctgcaggtaagttaactggtacagcatgttaagaggacaatttgctaattttttttctagcaaaataatcagagctgctcaaaagagagtttcagacagagatcatcactgcattatttataaggacaaagacttggaaatcacttaaatgcaccaacgattggagagtagttaagtaaattttggtgcacacacacagtggaattctatgctagtattgttacaaactgtttttgtggtatatgtatctaatggcatgggttaatgttcatgctgtaggaagttttaaaaaaaagagcctacaaaaccacgagtgtaagtaattactgtgtcagttttgtgaaatataaatacacagaccgcatatcagctggggccagtttaccagtgaaatctatgaagtattgaccagaactccccatttcaaattctgcacatggagatttcaaaaagagcacatgagcccctgttcactgcctgccctggattctagaacatcagtcaaattcttctggctcccctaactgaaccaaatgtggacctgggcccttccacaccaccctgccgaagccacataacaaaggctgtttcctgcagcagcaaacttctcttggtgtttggtgggactcaggcaaggggtcgcattgccgtcctgcccagcatagaactcatcctttctcagactttaaaagtcctttcaacaggcaagaaattttcacctctttctgtttcctccctcccaaattgcccacaggtgcagcaaagtcttctcattcaagttcctagagcagttcaactttctctagactctatttccaggcccctctttgtacatcttttgcactgaactgaacattaagtggggttgggggagggcggctcattctgagatcaaagtgtttctttgaatggaaacaacccttcttaaaatatgtattttaacctatctgcccttgggtataggtacagagacagacatgccatatatatgtctgtatattatgtatatatattcatgtatatatataaatacacacacacatacacacacacacacacacacatatattcaggtattgagactgtgggtcacaaaaatttatataatttagaaattgttgtacccattggagtcaaatgtgaatgtgaatgattgttataaattgtaaaacactctatatgagggtatttttattacagttagtgaatcattgacatttttggacagtacagaaacagtcccaaatttgctaagccctgagatgcaaaccaagcttcaagctcagtgttcaaatagagtaagggacagttaaatagggggtttgctttcagtcccatcagagttttaatgctagattcactccttaggatgctggacagccttgggcaattgcttgacctctgtgaatcagtttccccctctgttaattagtataatgctgcttacctcactggatagaaatacaggtcattaatattaatgatggctaataatgctctgcaaggcttaccccactgactttgcctgcaaacctataaccccatgaggtaggttttatcatgaccattactaccaaggccagagagatttagtgttttgctccaagtcacacagtttaggaagtagctgaggttggggcctactgagtccgattagagtcctgctctggacccagctgaccatagaactctaagtacaatgcttagaacttagtaggtgcttagtaaattggagcctttggtactttaacacctaggggctcactttctctctcattatcaatatattacctacttatatgtttcaaactggtagtaaccagttttggcaaggaacgaagtaggctcttaacaggcatttctgcaggtgagttaactggtacaacatattaagaggacagtatgctatcttttttcagtttctctctcattacctaggccctaggccttcctcaccattaaaccccaaaaatcctcattgccatgagtctgaggggctagccctttgctgtgttcacaaagctcactctatcaagagcttggtatgcagcctcagccaaaatgatgcctgagccagaggaagccaagggcaccctgtccattgctggccattctggaacgcagaggtctccctgcagtgagaagaatgggagagttatcctgagcagtgagcccaaacctggcttggtgcagagaaaaagactctgcctgacagaaaagaggaaaaccagagtgtcagttgtttctaaatcccacccactattggcttgagccacaagtcatcctgagattcttgagatgaggtgtagcaggaggtgagagtgggagttagggggtctcgaaggtcaatgggaatccaccagagagtggttgtccatccaccacggccatgtagattttccttgatggggcttcttaatcattagaagcttgtaacttttccagccaacccttttcccacctgggcttagggcggaaaatggatgcagccactataactactctggtggtggctgccattttacttctttatcttcttcatctttatacttgaaaaaaagaggtagcacatttttgaaatttgaaagtaaccttttgaaaataggaaatgtatttcatattccaattaaatatatattttttgcttgtgtctattcccttttagtcactgacctcattctcatgtaatcatgctccatatgccctttagtctcattggtcactctacagcataaaataaatattttacagaaaagttttgtgtgaactagttaactcatcattgccctttacatgtccctttaaaagtcacttcgcaaaggaccttgttggtctagcttcctcctcctcactctccattttaaccatttaaaacactgtttacggctgggtgcggtggctcacacctgtaataccagcactttgggagtctggggcaggtggatcacaaggtcaggagttctagaccaggctggccaatatggtgaaacccgatctctactaaaatgcaaaaattagacgggcgtggtggcatgcgtctgtagtcccagctacttgggaggctgaggcaggagaatcacttaaacccaggaggcagaggttgcagtgagccgacatcatgccactgccctccagcctggacgacaaagtgagactctgtctcaagaaaaaataaaaacaaacaaacaaacaaaaaacactgtttaccaaacttaccctaattcatagttgtctacttatctgtgtgtgtatttgtttattacttgccctttccattagactatatactccccagggatcgttaccttgtctgttctggtcaccagtgcctggaatcatggatggcacctggagggatgcaataaataggtgttgcatgcatgaatgaatgttgtggagacaaatgtgtgcactggagaaaagttggaaaatcataaaaatatacacacaacaatgaaaagaatccaacaaagcatcactcagtgataacaactgttaccaagttggcttttttaatggtttcatgtcttatatttagctcattaactaatagagggtttgttttggtctttggtataaagggaagtttcaactttgtttttcagtatttaacctattattccagcaccgttgctggaataagcttacaataccccaaacagtgatggactggggagggagagtatgggagtttcttgggagggagaagggatggaagcttagagcctgacccaaagaagcttcacagctgtaagagaacctatcagagtgggtgccatatttacaaatcttctgaacttgtagacataatggtggagcagacaccctgttagggaaatttattttgggaggaaagctccagccccttccacgtggccagcaccacctgctcttgcatagcctttacagtacaatcttcctagagccctttataagcacaatttctattggtcctcacagtttccctgcgacttaattcagatgatcactgtcattttacacagggacactgaggctctgaggagtaaagtaattttccccaaatctcaaatctcgtaatagctgtgaaatagcatctcctgaccccagactcacctgactcctgccgtctgttcactacagaaggtttctatgtgctgtgaatcttggattaaccagacagcatgggggaaaggtggtggcgatgggatggaggaggcaagagctctgattaattgaattttttttatttgaaggttaagcagcgaatccatttaaacttgacccacactattttatataggactgtatatgaactaaacacaataaaattgagcccagaggaatatcccttagaaggaagaagtcaataacataacccttaattaccttttatagttggtacatggatttgactttccccgcacccaccccaaagcatttgaccaaagccatggcagcttagacatctaaagacctcccacaggctgggaaagaccatcccactgtcttgaatagattagactctaactccctgaggacagacctctgtgtctggctggcgcatctggtagtttgaagagtggatgagtgtacattcttaattaggtgtggctatcaaggtaacggtattctgtattatgggagtttagggttcagactgagtgtgcagtgggatgcctgtaatatgtcacacaaaatatcccaagaccatgacatttaattctggccacatattccaaagatagatgaaagatattacctaggagagcaccaggccctatggggatgagctattaaagctgtcatatgagcaggctggaggtgctgacccagatgttttttttgagagttagagagttcctggtgcctggagctgttcaaacttctgctgtatatagtggaaaagttaaggcaggtattcacgtcttaatggcatttcgtagcaatgatgaaaaaaatatgttttcattattttattttggaagatacagaaaaacactaaaaaaggatgtaaaaagaaaccatgaaccccaccacatggagattatacaaaattttgagacatttctttccattagggtttacttttcttaatacagacagatatatctccctggacaaaactgagctaatatgtaaatgttgttgagtaacacactttaaaacaatgtataatgaatatttttctatgtactcaagtacctttttacttcaataaatgcaaatattaaattgaataatatataatagaattgaatagatatggtcttagtttttatggatcctgaatactaatgggggagacatacattacatttaatatagatacagaaatacagttttcattatttgcagatttcatatttgcaagtttatctactcactaaaatttatttgtaacaccaacatcagtactcttggttctctcccagtcattcacagacctgcacggaacagtgaaaacttttggttgcccagtgcacatattactagctggggtcagaggtagcactctgccttcttgtttcagctcccctactgtaaacgagtgtgcttttcatggtttatttagtgttatgtttttcacatttttgtgctgttggtgattttgctgctttaagtggcccccaagtgtagtgctgaagtgtcatctgatgttcctaagcgcaagaaggctgtgatgtgctttgcagagaaaataggtatattaaatgagctttgttcaggcctgagttacagggctgctggctgtcagttcaatgttaatgaattgacaaaatctgttaagtaagctgtctttaaacagaaacacacagaacaaggttatgtacataaacaaggttctatattaatcatttgacaaaagcattgtgagcagaggctcacaggaactgaactttgtatttctcctaggagccatgggttcaatattcagtaattcagtgcaactttagagaacattacttccaataagaagaatcagttagatatatgtacaagtcagtgatagagacatacatttgggttctttggctctagatataacttaaaactgttaaaagataattttcaagaaaaggtaaaatcaaggtacttttcttaagaaaaggtaaaaaaaaaaaaaaggtaaacctcacagagatgtaaaaatgaacatgattgcatttaattcattaatgaagaaactggtgaggtgttacagccagtacagaggaaaattcaaaggtaagagatctgtatacttcaggaatatgcaaatggaagcaaaactagctttttttccttgagggagcaaggttgtccctcttcctgatcatggaaccatttgcatatctatggacaagaattattctgcattattatcagttatctacaatttccagagttgggaaacagctcccatagaatcagaatctgataacaaggaagcatgagctataaacaatgcagtttttcattgaagcacagatttttcccccccacaaagccatactaataaatgccatcaacctagataaagcatgtggagagacaagagaggccaatcccagggaatgccaccaccataaggttgggttgtgaagaaagagcctgaaaagaagaccatgaacgaacaactaaaagcaggaggaaaacaaggaagttgtgatgccctcaggtcaacagcaaaactgaggatggagaaagtagccaactctgaaggattgagtaagaggtgctccaaagggtccccttggtgtattagtccgtcctcacactactataaagaactaccagacagtgggcaatttgtaaaggaaagaggtttaattgactccctgttccacagggcttaggaggcctcaggaaacctacaataatggtgggacaggaagtaaatacatcctttttcacatggtggcaggaagtagaagtgtggagcaaagggggaaaacccttataaaaccatcagatctcatgagaaatcactcaccatcacaagaacaggatgggggcaaccactcccatgattcaattacctccacctggtcccaccctcgacacatggggattatgggaactacaattcaagatgatatttgggtggggacacagccaaaccatatcacttggatttgtcagtgttggagtgatgggtgacttggcattaacagatattaaaaatataagcaggcaaaagccagtgtcatatgataggtgaaaagggggtgagagagtggaggcattgttttgattacagtcttaatatactgttatatagatgtacaattgatttcatcctaactttgatttccagacatgtaagtttttcctaatttttaaaagctgtaatcagcatcctgaaagatactaatatatgtgcacatatgtaatattttttcctggaataaattcctggaaccgtccttgctgggtcagtgagcattttcaagactttgagacagttcttcaaaaattgggtcagttttcaccctgccttcaacagtggatgagcagctttgtttatttggacatgcccatctatagctattatgagttgacattctgcctttattcttctctgttttcctgagacaataactctgcaaacaagtggtttggtgtttggagctgataatcaatggcttttatttcttatcactacttgtaagtctcaaccccctatttggagcggaatccattctctcccttactggcgttaacacatgtcaaatatttgcaggctcttatctttcctttaggcttggcttaggcaggctctgaatttttagcacctgacattttctctcccacatccatccctctattttccttagggctttcctatcttgcctcagcttttctccctcttaaggaagaaaaggccatgcctccatacctaagaacaatcccatctaccagggtcaatagggagattttccacctttacctccctgtgagctgcatgtcagctttatttttaaaataaaagctctatccagctcatgtgcattgagaacttgcttcaaggatcatatgtccactgtttctcatctctgatttctgcacttgatggtatttcttagggctgtgtcctctgcccaattctctcttcattacacaaactcttcctagatgtcttacctgttccatgacttcaacaagacatgaatatatccccacttctgaacttcaagtccttatgcctgactacttttcctacctgttttctacctacctcaacattataggttgatgctgaaaatggtctactcctatttggtaaatagctactccaatttggtaaacatcatcctgtttgcccagatcagaaaaacctgagagtcatttggaatccacccctcaccatccttagcctttacacccaatcagccatactactgtgcatgttccctccttatcctttagatctgtttcttttttctccagttttactctcccattcacagatgtggcctgaggagtctttgctgccactattcattgaagtctcatgttttattttacacccataaccaaggtataaatatgagatctggtaaatttctttttttcttaaaaagatggagtcttgctctgtcacccaggctggagtgcagtggtgcaatctcggctcactgcaatctctgcctcccagtttcaagtgattctcctgcctcagcctcccaagtagctgagattacaggggtgcactaccatgcccggccagtttttgtatttttaatagagacaaggtttcaccatgtttggccaggctggtctccaactcctgaactcaagtgatccacctgccttggcctcccaatgtgctgggattacaggcgtgagccactgcacccagctgagatctggcaaatttctaaggcagattattactattttttcttttccagtagatgatgatgtatttttaaatgtgatttaattttgctacttccatacctttccatttttggtccattgaaatggaccttttcagggtggaaggggtattacatgtctcattgctgataggatcaaatacaccatgatatgattggatccattgaattgtcattgctgaagaaggtctcgtgatgactaaatgggaaagtgaatttaaatgcatataacattaatgcaataagatataatctataaatttctcttcaatgcgggtagtagtgatattcttgccctgatgttagtgggctttgggaagccacaggatattccaaggagagtatgaccttccagatttaaactctcatctcactacttaccagctgtgtgaacctgagcaacttactaaacttctctgggctaattccttatctatacatttggaataactgtacccatctcagtgggctcctgtgaggctttaatgaacagatatgtagagagtcattcaaggtgcccagaacatgataggtacacaggaaaaatagttatccagcaaagctggtattgtctggatgtgttggacgtagtgcagtctgcaaagagataactctttcgcttgtccctacccctctctgtagtaaccatccgcttgaatagtttcgtgccctcaatgagtgggttctgggggtagagtggccctggatgtctggtgtgggatgttctcatttgtggccagttgctacttccttgttccactgcagctttttgagaggtcctccctaagttgcctgcctgcctgcctgtctgggacagtgttttttgttttttgttttttgttttcttcatccttgaatgcactgtgctagggagagccttcttgcatcattcttggacctttctaccagccttctcctcctgggtgctaattaccaacttcatgtccttgctgctgttcattctctatgggacagcaatggggagcatcccaacaccaaacctagcctgatttctccctcagtttacatagtttccatggcctctaacatcctgggagtgttgtcactacctttcctgccatttgaagccctgcaagagcttctccagcctcccctgtcctgtcctgctccctttctgcgccctttttccttattttactttgtggtcaggagatttcaggacttatggaaatgttttacggcctggaaaagcaatatgttgactcaaaaatgtaaaaagaatactgaataattgaagctaacaagaattcgttatctatgacatatgtgtctacatgcctttatagatattgtcaaatttactgttcaaaaaatttcattacacttaacgataaactgtgggttagttttcctcgcagatcaagaattcccaaaggaacaaagtgattagagaaaccacagacagtgataaattattaagttcttggaaaccaagtgatgttgaaaatgaaactattttttaaatagttcaaaataattttatgacaaaaatattccagttactctcaaaggtagaatgcaggtgtatcttaatacgctgtcagggagaattccacaactagactggcctgtgaagatcagacacatctgtgggcttctccttgacctccagccttccactccttagctgcctgctgccatgaatttgcacctgatgattgcaagatcatctacctttttctttttattatcactcaattctgtgatacttgatgctgtccttgataggctgtaagccatacaagactgaaggtgtgtgtattagtctgttctcatgctgctaataaagacatacccaagactaggtaatttataaagaaaagaggttgaattgactcacagttttgcaggacttaggaggcctcaggaaacttacaagcatggaaggggaagcaaacatgtccttcttcacatggtggcagcaaggagaagtgtagggcaagtgggggaaaagccccttataaaaccatcagatttcatgagaactcactaccatgagaacagcagcatgggggtaaccgcctctatggttcaataacctcccactgggtccctcccacgacatgtgagtactatgggaactacagttcaagatgagatttggttggggacatagccaaatcatatcagtctgttagtcttatttatctgctgggttcccagtacagagcacaggacttcacacatgatgtaggctgtcagtgctattaactggtagagcactggtcagtcctggaaagttatgatggagaaagagaatgctgggaaatttgccttttatgaggtccttagggttaggtctgagtgttgccagatccattctgattattctaccacatgcacctcatatgaactgaaggacacactgttcaggaaatctgcactaagtgatgtgacacaaagatgggggaggtgacacaaaggcagggactcacccttggcaaccatcaggcccttgatttggcctgctatcagaggcaccataggcatcaatgtcttcagtagcctcccagcagcaaagaaaggaatgtgatgagtaggattggttctgacagcacagattggagtttctaggagctctgggactcatgagtgaaggggagggggatgctctgagagggaaacaggaaatcagcaaccagtggcagaaagaatccagagagccacagcaatcataaccagatgcaggctggaaagttacaacaccctgcttcgtgcaccatccctcagcacattcctcagggtagtgatcacagtgtcttctaagctctggtacctcagtgcccagcatggtccagcattgagcaagtaagtactcaaggaggttctgttaaatgaatgaagggctacgtggtctaagcatgcaaatggcaatgtggattcagagcagataattccccttaaaggaatctctccaagtatcctgatttcataatgaatgtttaatagaccattttttttgtcatttgaatagaatagaaacaatatgtggcaggcattttacctacattctctacttattaatagcaattgaagatatagtatcatccatcttcctttttttttttgttttttttgtttgtttttgtttttgtttttttgaggtggagtctcgctctgttgcccaggctggagtgcagtggcaccatctcggctcactgcaacctccacctcccgggttcaagcaattctcatgcctcagcctcctgagtagctgggattgcaggcacacaccaccaagcccagctaattttttttagttttagtaaagatggggttttaccattttggccaggctgatcttgaactcctgacctcagatgatccacccacctcagcctcccaaagtgctgggattataggcatgagccactgtgcctggccatattatcccttttttaaggatgagggtgaagcttggagaaggaagtcacttgtccatggtcacagagctaatgagtggcacacccaaactttgaacctagatgaagcttccagtgtctctgctcagcaatacaacctgccttgaatatcattagtaatgttctagaaaaggcaactgctcaaggcacagaaacctcactgggcttgtaatcacagcaagtggattccagacctgcccctgcctctgtcccttaatgactgttgcttaatctctttgagcctcagctttctcatctgtaaaatgggaacaaaatatgactagctcatagatttgaaacagtcactaaatggaaaacatttgagaaaatatccatgacagttgttggtaagtagaagttaaacaaatgtccattgattctgacatttgagatcaatagggtatgcctatattttcttatatctgactttgacaagcaataggggtttggccatgtttgttaattcctatttattctagtttaatatatgtccgttgtcacattcaataccatcatttttagactttccatctgtaaaggcatttatctttttctctcacaataatatataccaaattcactttcctttatcaaaatgctttttgtttatagaaccctttataatctgacaccattcagatataagagccatttaattacacgtgtaaaataaactaaaggctactttattcactcacccatttgaaaagtgagtgaataaagtagcctttagtttattttgggggcctctctggagagcttcgccagagaaatggaggtctatgcacttcctcaagaattcaggtattgctggggtttcttaattgtgttcttttctcactgtgaacacataagatccaattgcatttgcctggccgttgtcattctttgacacactggcagagatgagtattttctccactgtggttgttttcctgagaacttaaaaatataggaaggaaattgctttttctcttctactttatctttgcataagtattcttgggcatctcagagcagcttaggagatgacctctgctttattgtccctgcagagccaagacagaaatgcaagcagcagagaataaaagcacttttcttgtgcatgctgagtctttcaacaaccctggcctctgtgactgtgtctgcctgtaactgtcaaggtgatgattgaaatgaatctgctggtcaattccagtttagtccaatccctgatttgaaaaggccccctctactgcagctgattgagcaattgtttttcatgattgatggaggtgacagatttattttagaaaatgaggtgatcctgatgagcccagggagatggaggagggcatatgtatgtgtgtgagattgcttgagggagggaggatactgccttgttaatagcatctggcagtgatttgtgcagaaacctcagtggtgcagaaggtcagttaaggaagtagtggacagggtattggaggttggttgggaaaacctggatttcaagtcctggttctgctgtttacttggacaagtttcttaatcattctgtgcttcatcacctgtaaaaaaggagccaagtggaagagactgctaaccaatatctgtttgtaccttcttacttcctgagatgggattatttttttctggcaatgatgtgagtgctaaaagactatgcccctcttgcagctgagtgtggtcatgtgaccaagtgttagccagtgagatgtaaagcagagtggtggagggtggggccttttggagagctctttataaggggaccacagttggagcaggctcttactgccctccttgtcttccccttgcctggataacatagacctgaggcaagtaagccttgcctgcatccaggagctaaggcaaggctctgattggctctgtgctgcagatgcttgagtgctatgcaaatgcaaagaggttctcttgttaactgcacctgggttgtctctccaaacatgagagagaagttgagggagggatatgtctgctctcaaccagcaaacactttttgcagtaaatcaagcataacttaggggctctttcaggaccttcccatactccccagagatgagggagttattactttaaccagcattcatatctttttctctgtgaggaatctatggatacgtttatagagatggactttcaccacataaatgtgtgcctccatgaacttggcttataggatgtggtgagaacatggagtgtatgattctgaaatcagactgccccagttataggtgagcaaagagagagatgagtgttctgcatggccatcaaggcatgtgatatggtttggctgtgtccccacccaaatctcatcttgaattgtagctcccacaattcccacgtgtcatgggagggatccagtgagaggtaattgaatcgtgggggcaggtctttcctttgctgttctcatgatagtgaataagcctcacgagatctgatggttttataaaaaggagttcctttgcacaagctctccctctttgcctgtcgccatccatgtaagatgtaacttgctcctccttgccttctgacataattgtgaggcctccccagccacgtggaactgtgagtccattaaacctctttccttggccgggcacagtggctcaggcctgtaatcctagcactttgggaggccgaggtgggcggatcacaaggtcatgagattgagaccatcctggctaacacagtgaaaccccatctctactaaaaaatagaaaaaattagccaggcatggtggcaggtgcctgtagtcccagctactcgggaggctgaggcaggagaatggcatgaacccgggaggcagagcttgcagtgagctgagattacaccactgcactccagcctgggcgacagagccagactctgtcaaaaaaaaaaaaaaaaaacaacgacaccaaaaaaaaaaatcccctttcctttagaaattacccactcttaggtatgtctttatcagtaacatgagaatggactgatacaggatgtgcccacctgcagggctgtggcctggcctccctccaagaagcatgatttacatagccttccacatgaatggtacaccttggagtcgaagagtacagtggcgctagacacgcaggggcctcagcacaggcatggaattgcagctgtagcggccttcttgggctgtgttttagtcacattcgggggcctagggcaactcttcatgtgggcagcttctcacttaatgatagaacctgctgtttctcttctgaaccttagcagctgccttccgattatctgtgtagtgattcaacacattccttgagagcatcaggctgctgaggccaactgtgttcctgtgatggcttctctctctgccgggcttggtttgctgggaggacagcagtagtcttgcagagctgagagggggatgtagagtaaggacaaagcaccccaacagccctttttgctgttaatgaagcatgttcgtgaaggaccccttgattgaagtgatggaggagtctgttcttcttgagccattttttccttggatgcatttgtcttcaatatgacagccaataacccagtaaattaaacagcatgccccaaggcccagggtctttagaagagctctgtaaaaaccccagacaacctcaggggagccgtttccccagaggatcaggggaaagtgttttcacctaaagtctaaggaaagacccacttcagggccatttctaagctgctatctccaaagtgtccttggttgccatcttgagtagggacgagaaatttccagcaaagcttacctcagagaagaaactcctgactttgttattacttaatgatttctcttaaccctgactgctgtagattcgacttgcagcatcttatgataaaagaagaagtcaggataaccagactgttcttttagttctgaaatctgagaggaacaggctactagagccttggtttaatgagcgtcagccggtatcacagacgctgtccctgttagcgggtttctgaagatgcagacacatcctccagccttgtgtctcccatgactcctttcacaagcgctgagggtggaatgctcaagtgcagagtctgtggaggtgaggtcatagggctgagagtggagacctaggtgtggaacttcctgaggatcaggctgattttacagcagagactcaggggaacttgcaaattggatggtttcatctattagctgtcacagctggacttccgggtaaagtgaatgtctgagaaattgaacctgaaacgtgcagtgggaatggattaagaggagctctgggctgttgacgggacaccaggggtacagcatatgaggggaccatttatttactttatttattcatgtattatttactgaatgctgctctgtgacagacactgtagtggagactggagatttagaggtgaacctggcatcctcccctgtgtcttagtagcccacactctcatcacaagaatggcaaagatatgaacctggggatgcaatacaagcatatcataactatcttagtcattggaggctgggcatggtggttcacacctgtaatcccaacacattggaggccagggtgggaggggtcacttgagcccaggagttggagaccagccctgacaacatagtgagaccccatctctacaaaacaatttttaaaaagtagctggccatggtaacacaccctgtagtcccagctactcaggaggctgaagtggaaggattgctcgagcccagtagattaaggctgcagtgaaccacgttcacgccactgcactgcagcctgagcgacagagcaaactccatctcaaaaaaaaaaaaaaaaaaaaaaaaaaaaaaaggctgtcttaggttgggatctctagatatagagcctgagataggagaacaggtacatgtgatttattgagggaggaacctgttgaggagggagggatgtgggtggggttgagtcagaatgtggtcaggttaagtatccccttagttttacccagaagctgaagcctatagtgcagcaccatccaacagaacttcctgtgaagatggcagtgttctgtatctgggctgataggagagtcaccagcgactcatggctactgagtactcaaaatgtaatttttggagttgaagaactgaaatattaattttatttaattttaatgaatttaaattgaaatatccacatatggccaatggctaccatattggaagtgcagctctagggctcggtggacaagtttcttccatcaagggccagagtaaatactttagatcttgtggcccagacgacctctgttgcaataactcaacttctgttgtagcaggaaagcagccatggacaattcaaaaaggaatggggtggctgtgttccaataacaatttacaaaagcaaatggagagctggatttggtccatggtccataaagcacactgaagagttgccccttccacatacattctgccaggggccagccttgcatagcctatgccagtttgcccttggccgtgggtcccctggagaagaatggtagtttctgggcaaagtgacacctaccagttgagggcattgcctggagcaagggaagggtgggtgggatgctgtgattcctgggcacctgacctcacagcaatggggatgggtatagtggctgggtaaggagaatctaggaggtacactacagtgtctactacaataatcaacaattctttttgtgtgttcactacaagccaggaagagtggtaggtgcttcacatggattcttttcattcagttatcaaaatagacctattgagaaagtaattgaagcatctccagcacatttctataaaactcactgagtttcatcacttcagttttgttggcttgtaaccaatgaccaagatatttattctgcctctctctctctgtcacccctccctacacacacacacacacacacacacacacacacacacacataaatacacatcccatctgaaacatacatatggtgctagtggcagtcatgtccttttttcctctgggtggctttcctctattcccagagacctccgtgacctgatctatctttgttgtagccgcctgtacttactctgactctccgtggtattttacagcccatatttccttcttcataggaaacccatctctccatgtgttatgttgggttccctcaaaaacagatcctgatttgggtgtaagtcatttccttcggaggtgatccctgaaaacacagtgaaggctcagggaagggaataaagaccaatgaagggtgtgttaatgggcaggttaccattgtggccaactgtggttcatccccactggaggccctgctggacacacatataccttagaaagttagggtatttatccacccattcccagccgacattggatgagggtcgctcatggagtgttaacttcctaactcttccacacgacccagagttgagcacattccctcagggagagccccttcccctccattcagggagactcaaaaagcaggctgcctgtgacctccaggctgcaggtagggttttgtcagcctttgtcacactcctctgtcttgacttactagtagttctccaaacatggacttttctgacttagggatctatagccaaattctacagtgccatagactgcgtgacaaattgcactgtgaaggagaagttacagacttactaacttggggtgagaaaataaggaaaccacttcatgagccttggcttgtacttctgattgatgtagcaaggttctgaacttctctaggtctcagtttcttcctctgtataatgggagtgatggcaaggcttttactgtaccttcaatgagaaatggaagagcacatacttagtaatctgtgcaatacatatgaatataagttattgcttaaggactaagtgttgtgattaaggcaatgtaaatgaattgctgatcattatcccaggtctttaccttaatgtgtatgaatctggagctccttactcacagcctacctcccagaaagtccctgagtgctcctggggccaggctctggggttacactgaagaccactttgctgagtctctggactttgagggctcatgaccagagatgaggaagacccagggtcattaccctccatgcaaaacaccttattcttcattgcatcctatagcccctgtcccctgtatctgtgcccaaatacaagatgcacaggtaagagcctaacctagtgatgaagagcatattgataagagaaggggcatgaacatagacaaaggaaagccctgtactctgctttggaaacatgaagatcagtgcccaagacctggaaggctgtactgataaattgggaggggacttggatgatgttttcaggtatttcatctcagggacacattgcagagctttaagcagagagtgacatgtgttttgggaagtctctctggtttggagtgtaaggcggattagaaaaggtgagtctggaggctgcaggccctaagaggaggctgtcacaaaggtccaggtgacagagacaatgaggcctggatgagaacagggctgtaaacctgcacagcctgttgaaggctcagttgcagattgggattcttgggactttactgagaagtggcaagagtgcagttagggcccccttggttttctgcgggtctcttcaggcacatcacacagcctggattttaagagcactgcatcatgaagagcacttcactccttcaatctgtggatcttgtgtttgctagaaggctttctttcctgatggtgttctctcttcccagagcaccttgtcaaagaaggagaaggagccataagctcagagaggaaggcagccagctcttgattcatgatgcctggcctggctgaaaagggaggtccatagaggcattatgctcaggcaaggggagggttgcaaccagtcgtataaagcagcttggtatgaggagctctcttatagtgtgcacaaagcaatgcatagtggttgtggcggaggctctgaagctgagctgcccagcttgaaatgcttgcccatcactaactgtaagcttgggtaaggtatttaaatttttgcaccttatattttcatcttgaaagtgaaggtagctgggcatggtggctcacacctgtgatcccagtgctttaggaggccaagttgggaggattgcttgagcccaggagcttgagaccagcatgggcaacgtagcaaaaccttgtctcaattaaaaaaaaatagctgagtgtggaggcatgtacctgtagtcctagctactcaggaggctgaggacaggagaatcacttgaacctgggaggttgaggctgcagtgagctgtgattgcaccactgcactccagcctaggtgacagaacaagaccctctctcaaaaaataaataaataaaataaagtaagggtaataacagcatgtacctcatgggtttttgtataaggaataaatgatacaatccatgtagaattttggcaaaatgcttattcaccaggtgttatcagcatgtatgaagaaaatagtatgtgtgaagtaatggaactggttgcatcagtcagctattgccataataatgctgcgtaacaatactcaatgtgcatcttggattaactagcaggtcagctggaactagatggtctcaggtggcttcagctgggtgactccactttggtccacctggtctgacattcaataagctagcctggccttggggtgtcttctcgtggaagaagtagggatccaagagaagaagcagaaatgcacaagcactttttcaagcatccacttgcccacagtttgctgttgtcccattggccaaaacaagtcatgtggccaagcccagagtcaaagtgggaggaaactacccaattacaagtcaaatacagatccaaggagagcactaaatgtattcattaacacaatcaatatcactttggttttttacattaacctcccaaagtggggttaatccttgaggcaatactcatttcaacaatcctgctctcccactaactaattaggttattcttccttgggaattattggtattaaagagtgtaatactagttaccactcactgggtacctcattgatctcaggtatttaatgttcctacctccggaggctgttatgaggattaggtgggataatgtacatacagtccttagtttagctcagagtgagcacattgtattaactctacagattcacattattattcacattattatcattgttgtcaccatcaagattattactattccctatcttactccaaatgtaggcatttttatctccatttaacaaataagtcactgagactcagggaggtccataactctgtcaacgtcccacaactagtaaggatcagagctttctcagtcagttggaaaataacttggaaatagttggaagtcattcatatagtgtgatgtgaaagaatgatcattaatatgcagaaaatctaattctgagcccacacccaaggccctctagctttggcccaataacctgaactgctctgaagggtttccaggagtgtgtgaatcctcttcttagtggcagccttgcagaaacagaccatttggcactcacttgtctccccaggctgaattcccagacatattcaatattatctggacaggcacactgctggtgtaaacagtctggttgctgagttggatttaataaccttgtagttccctgcatctttcaaagcaagctctatgctctcccatctcagctccatgttagcctgtgagacaggtatctgggtcctcttggaagagggcactctaagacgcttagaagtcagtatgaggctgcatagtcaagatagagctgggactggaaactgggacttcaggctccaagcattgctccctctgtcgacaccaggtcttgcctgggcatggaggtatcatatcatgcctctctagcctttgccttgcctctctttaccactcttggtctctgtggctgcttattccaactgcttaggttcttttccagggaatatcagtcataaatggctcatccaagccatttgcaagttctctgggtccactggaaagaattacattcagccttaatctggctcccagtgatggcaaagcatactcacagtgtttgtgtggatcacagacttagagggacttttccaaagtctgtaggctttggtttacagaaaagctgatgcctgacctatgatagagaccctcattaatgactctgtaaatgattttcaggcgagggagcgaggagacagagagaatgtataaagcccccatcaaagacaattcttgcagacctataattcttcaatatatcctatactctcagctctcactgctgcttattcatccagggttccaggctgttctcagtgcacactttatcagttcatgcaattacccttaggaaggcctctcacacatcgctagtgacagattagcacagtccttttggaaggaataggaaatgtgtatgaaaggtcttaaaaatggctcatgctctttaaaccagcaatcaatgctggagaaattatcctaaagaattaattcaaacctaggaaaatgctatatgcagggcaatttatggtagcaaaaattggaagcaacctaaattcccaacactatggtaatggcttagtaaatcatgaccatccacttagtggaatattatgcagcaattaaaatggtaattatagatgctattgggcaaccttaaacatgcttatgatataatgctaaataaataagccaggagacaccattgaacatacacaatgattaaaatcatgtaaaaatatgtgtttgtgttgtcattaatggtggggcccgaggaacaatccacatttcaaattcccagatggagtaagggtggtttccagctagaaagcaaaatctgactgacacagaggcagcccaggcaagctgaatggtgatcctcaatgtagatttaagtcttccactaatttcaaacatctctagacatttttttcccaatgcttattttcaatacttgtgttgattagagaagattctcgctgggtggcatggcaggtaatcctagcactttgggaggctgaggcggtggtcaggagttcgagaccagcctggccaacatggtgaaaacctatctctgctaaaaataaaaaaattagctgggcatggtaatgcacacctctaatcccagctactcgggaacctgaggcacgagaatcacttgaatccaaaggttgcagtgagccaagatcatgccacttccatccagcctgggcgacaaagcaagacactgtctcaaaaaaattttttttttttaaagaagtctctatacttaaagattggtgcccagtgaatgaagttcccagtgaatggtaactagtgttacactctttataccaaacaatgtgactaaaatgtaagcaaaaatgtatagacaaagaatagattcatataactaccaataaaaaaataaattttactggtgcttatgaaatctctaatattctaatgtgtgggatttacacttcacgttggttcaagtaacacaaggtgcaacatgcccatttgattaagaacttgttagacttggtgagggcaggtacagaggtgtggtatgggcagaaaccagattgtagcaggtaaagaatgaactccatctgtgtagacaacacttttatgatgtttggctgtcaaaaggagatatcatataggtccatagctgctgacagatggcaggttaaaattcccagcttcattcgggttggggggagagggattttctggttattttgtaaagcagaagcggcgtagacaatttgaaatgctgacggaccatggccagagtaaaaagacaggtgcctggaaagaatggagtaagattaccaggaaggtagaagagagggatctaattaatgtctagataatttgtaaacactgaattataatacctaaaagagcatgtgaaatcttttgattggtttgtgtctcctagtgtcctgaaatttaggagcaatataacagacagggacatcaagaagagaaaaagtgggaaagcttggaaagcccagaagactgtgggctaaggaggagactttagggaaagttctctgggtgctttttagtgaaatgctgtaggctgtgctaggggaatgtaccctcctgtgtcccctacaaaatgattcgtgaaaggaatatgcttccttagagttgagacccaaggaatgctctgggaattgcggagagagcggattcagggccagaacagaggctgcatgcaaaggcagtggatggccagggcataggagactcagggctctggtttcaaattcaagtttcttactttaccacgaggaaaacagggaatgaggaagtgcattcgtcagctaaaatgggtgataagacagaacagaggcccaaagttacaattaaagcaagtgactaccagtgttccttgttctattatttcttagcttatttaaaaaaaaatgtaaatgccactgtcaggctgctacagagcacctgtgagtgggtaaaattgtattgtgactaaaataggctccttgtagaagaggtcaagtgtgcatttgggcctttttctgagctggttcagatttaaaggtcaacttgtccttctattggagacattaataacttaaagaaacaaatgggaaggttctttaaaatttatgtttgagttacaaaaatctatctgaaaccttataattaatgtgctatagcaatctctgttgcaagagattttttttctagtgtttgtttaaatatgtggtatttaaattggctctgccattttaattctccattaattcatgggtttatcttagacatctttctaatgtgtgggaaaacagtttataaacagagaagaaaattgaaattcaacctatatattatggattttttaattgcagaaacaatgtgactaaaatttaagcaaaaatgtttagacaaagaatagatttgtacaactaccaacaaaaaaataaagaaattttactggttcggtgcttattccattctgtcacttgtggcttgagtatgtatttgatttacttgtgctcaaacttgggtttgtactattttatatcctgcttttaaaaaagcacagcatagtcaggattcatttagtcataagtaagacagagggagattttatggacttgtgtaactgaaaatccattgttgggcccaactttagacttgaataatatgagtcatatattctatccatagactcaagattaggatcagtttccccataatacatgtagagcaggagcgaagggtgagtatcttcaaaagcacacatccccatgtccacctgttttatgtttcgaccgctcaggcagggcaaagtagatgttcagccccgctaaatggacatcctgaagtaagatttagataagcttcccagtctatcccaatctgttatactgagatgtcccattttccctcctttaattggcaacaaacctgtctcacctctggtctgggtgacaggtacatgggtgaggctatcaaactgagtaatggaatgtgtttatctatggatagaatcagtagtgtgctgataaaaataagccttgaattgtaatgtttgccaatttcctgggtgtaaatattcctactgtgactgatttctccctatcagtgtaaagttattgaatattgggttgggaagagatgtgcacaattggctcctgtgagtagatacaattcacccttctttatgtataacagaaattctctcatatagtgtacattcttatttatagagtgttttcatagatgcaagtttgatttttaaatctcagacctttaccctcttagctttgtcagtttggaggctggctaatatatttgcagttgctctttcttaaaattatttattcaatcaattattcatccttttctttaacaaatttgtattgaatgcctactgtgtgtcagatactttcttatgcactgggaactcagcagtgaatcaaaccaagtccctgttcttagaggagctgacaatcggtaaataaatattattcttcaggtgaaaatgatatgaaaaattttcagggaagggacagacagtaatgaaaggggaactgtggagaagagcgattttaagtaggatggttatggaaagcttctctgcacaaagaactgaatgaagtgagatagcaagccctttgaagatctgcaggaaccccattctgggttgagggagcaagcagcaattgcaaaggatgtgaggggggaacaagcttggcatatgtaaggatcagcaaggaggacaatgagccttgagtggtgctagcaacaaggagactggcaggagatgatgtcagaaagattgttaaggcccagatcacatagatccttgctggcaatggttaggactttggatttttagcccagtgagaaggagacagtggtgaaccattctggcttctaagtgaaacacgtagaccagtaattctcaaagcatagttccctgaccagcagtgtcagaataacctgagaacttgttgaaaatgcaaattattaggtcctcacttaaacctatggaatcagaaactctgggggtggcatccagcaatctaaatcttaggaaaccctcttggtgatgctgatgcatgatagacttggagacctcgactatggctgtgtgctctctctcctcattgtatccctccagagtcagaggcaccatcttccatgaaggtttgagtgctatatttcatcatatatatcaacactgttaggttcctgtaagaatatgatagaatccctacagttgatactttcaaaagccatcagatccacacatgctggaacttgcacatctcaccatcacttccatccttcatctccattttattttaattaattgattaattaattaattatttttgagttggagtctcactctgtcacccaggctggagtgcagtggtgtgatctcggctcactgcaacctccacctcctgaattcaagcaattctcctgcctcagcctcctgagtagctaagattacaagcatgcgtcaccatgcccagctaatttttgtatttttagtagagacagtgttttaccgtgttggccaggctggtctcaaactcctgatctcaagtgatgcccccacctcagcctccaaagtgttgggattacaggtgtgagccactgcatctggcccatctccattttaagatcctcccaatggcattcttaaagccattggtgattatatcacactcttcaccaaaggtttgcttctcccttgaacagttttatgaagtatatcctcattttggtaattttattttgtaaaatgattctatctgtttgaagtatagcaggaagagcagtttgcaacacagcatgaaggttatttaacttgtatgtaacgggtgtgaattgttccatgatactaagtttaaattattaagtatggctcagtccctacccacttcagacttttgccctcccttgaaactgtaaaagaatgccagggcttgggcaacctccatgcagccataataaacaacccttccccaggatttctggattgttttaccatgtataagagtaatcaagttcgaggttactgtagcctaatattattcaaattgtcggtcaactctattaatttcataagtacaattttttagaaatatattcagcattaactcggtgactttccttaaaagccaaagaaagagtcctcacagtctagtagttaataattagttcttatgagttatatataactacactgtatgcaagtccttaagattccaatgtggacactcagcttgcagaattcttggtgacgatatcaagctggcagtttacagatactattcagcaggtgttttgaactccatctggatctcgttctaccaactagacctagaattccattagctgaaagttggatttttacttggtcttaaaacaaaaaataaaataaaatctaaggcttcaaaaaagagatgccacaaactgtatgtgtaattcagattctagcatttccaaatatgagaattattaccatggtatttgttcaaatgtaatcatctgagcatattactacacatatctgtgactcctattacaagcagttttagcaacaaaaataataacaatttttcaaggattataagttcatgtaattgcacatgggagaaaaatatggatgttaaagcctcttaaatgtggaaatgcagcacattgttgcctattatatttttcaggttcttgttcacgaatttcatcttaacctatattcttttttttcttcaattttgcccttttgtgcatagatttcaggaatataattaaccattgcatggaatttaaaatatttcttgatactggagttctctttgctatcaagtggttatttcaaattttatttacatagttattatttttcatctggggacacattcatttgttttcaatgtagttctaagtgtgactttccaaagtttatcatccatccattcatactgatttaaaataaaattaacttgttatgaaacctctcagaccaagaggatgcttgcctttctgaaaaatattttttttcagtatttctccatctagtgttcaaattagctctgagaaaccacaagcaagattaaaggtaattgactttaaactttccttttcattcagtcatccaaagattgtggatacctgctgtgtttcaggcactgtgcttggggctgaggattcaaagataagtaagaaatggaaatggctttggaactggaaataaaaaagacttaccttagatttcactttaatgtttgttttataatcaaactgaggtataataagtcaagttataatgatttgtttaaataatatgtttaactcccaaagcagactgcgttgcatgtgaatttacagtctggtcatatatacattttgaagcaaactcatctttttcatctctctaaaatgccagctattagactataatgcttcacataagcaggggttggggaagaaaaaagacatatttttcgtcttttttaaggtgcaaggaatctgaaatctttattttccattgacaatccttgattaattttaaaatgaaattagcatgcctgtaccttcctctacttgtcactataatgtagtctgtgctgcaaaacaaccctgaagttcagagattcaacacaatagaagttcattttataatcatgtgaagtctcatgtgggtctggtacctctcctgggaagctcttcttcaaacattggtgactcagggatttgggctgctttcatcttatagctctgtcatctctatcatggagctttcaaggcctctgtgacaaagaaagagagaaatagggggtagtgcaccaactcatacttacctcaacccagcaatgaacacacatcattaacgttcacagtcggtggaccagaagcagtcctgtggtctaccagaccagtcatgtttcatatttcagttttgttcctcatctcaagactgaattggcagttatcaagtaacccatcaaaccatatatataatattatatataattatatatataatatattatattattataatatatatattattatattatatatatattatatatatattatatatttataatatatatataatatatataatatatatattatatatatattatatatatataatatatataatataatatataatatattataatatattatatataattatatattatattatattattataatatattatatataattatatattatattatatataataattatattataatatattatagataattatatataataaattatattattataatatattaatattttattatatatatatatatatatatatatatatatattttcagagtcttgctgtgttgcccaggctggagggcagtggtgtaattacagctcactgtgacctccacctcccaggtacaagcaattctcgtgcctcagccaccagagtagctgggattacaggcgtgtgctaccacactcagctaatttttgtattttaagtaaagacaatgaggttttgcactgtctcgaactcctggcctcaagtgatcttcctgcctcagcctcccaaagtgctgggattacaggtgtgagccatagctcctggcctgtcaaaccatattctaataaccattttctcctactgtcaacttacaacgaagtgttagattggggtttaaatggacactgctatgctatctagctatgcagtgtacatttcttaaaaactatgataccgttctccaagcacagtcatgtgtttttccaaagattgtttgctgtcatcattccagaagttatccatctatttgatcaaattccagtacataaaatatatttcaagttgctatattttagccagtctacttctgctctctggtgttaatagcatatacattttccaatgaatcaatttcagatggtttctattgcctttgaaatgaggatcttctcaaggacctagaatgttcagtgtaagctagaggggataaccagagattctttaagaataattcagagtttctccccaaactgagaggactgttttctccatatgtatagcaaatgaagatagatattggaatcattctcaaaaagcactcttattccatgaggcagagcttggctgggtacttcctaacttctactttgccaaatagatgtcctatttatgaatatttcacttgtttctagcttttataggtacatactgtgatgtgccacctggctatcccttcaagaaaggatttgttaccctagctgctgagactacagctagcaggctgctcttaagtgctagccctatgtcaggggtccctgagaccatccttaggcttgatgatttataaaaggactcacagaactcaggaaagctgctatactcatgttccagtttaatatagtaaaagatatatattaatatagtaaatattaataaatatagtaaaatatagtaaaattagtaatattacataaatttagtataatatataaaattagtaatacagtaaaaattagtaaacatagtaaatatagataatatagtaaaagaatacagattaacagtgaacggctggttttaaaagaagcataggatagtggccgggtgtggtggctcacgcctgtaaccccagcactttgggaggtcgaggtgagtggatcacaaagtcaggagttcgagaccagcctaaccaatatggtgaaatcccatctctactaaaaatgcaaaaattagccaggcctgtaatcccagctattaaggaggctgaggcaggagaatcgctggaatgcaggaggcagagattgcagtgagccaagatcgcaccactgcactgcagcctgggcgacagagtgagactccgtctcaaaaacaaaaaaacaaaacaacaacaacaacaaaaacagcataggagaaagcatgtgtgatcttggggttgtgccagcaatgcttcatcctctcagcaacagtgtgtgacaatgcataggaaggattgccaacaaggaagctcacctgagctttggtctctagggtttctactgggggctagtcacataggcctggggtacctccatgactgctcagtctccggcgtccaaccaatacagcatgaccagggccccaggtgaacaaaaacaggcattcaccataaatcacattgtttgcataaactatctggcatatcccaagaccccagatacacaaagacatttgtatcaggctaggtattccaaaggcttataggttatctcccaggatggtcaaggggccagtcttctctttaaaatgtgcagagtttgagtaccccaagtccactgggttaaccttgcacaagcttgcattcattcattcattcattcatttacacaagcttcttcaagaatcccctcagctttagagagttgccttgcccaagattgggctccttcctggggcagccaatgttcactgactcagagaatcaagagtttaaatgttttaccatttcatccccaaaacaggacaactcacattccagccttagagctccccagcaggttagctgaagatgttattgggcctacctcacagcttgacttctatttctgccccattcctgctaacttcccctattctgcatagctgttgaccccacggaaaccacttaaaacatctacatgctaaactctcagagtctgcttctcagggaacataacatgtggcaatatgtgaagctgaattgagtattttcatgtgtagatcattttgttacttctaaaagattatcttgatttaagtcttcaggaacatttttaactaattacatatagctctaaaattaatatggaaattgagtttagaaaaaaatgctttttcatagaatcccaatgtatttcatcaccaggtggtagagaagttcatccatctcaccccactctcgccagtgttagacttcatcctattgattgtagaccttctgtataagacaattggagttttcttcctgtttcctcaggttattagcttgacctcttttgataccattgcagatcttgtcaatatggccatatatctgagagtttgttcactggcacaattttattaggcgaggatttttttttctgtaatggtttcttgggtaagagtctcatcacttcatcataagtaagcttaggaggcctggggacaagattacttccatggtaccactcaccatggtagaagagacttcaatcactcagagaatatctgtggtgccaaactccacacatggttctttccatagttctgaggttattgatacttatccaagagcaacgctcttgatagtaacaacagacatgatgtcatgatggtcattgtgaattcacttaggcctgcatggcaatcgctaataaccctttgtttccatgccacctgtccagcaaatatttctgtttctttccctgtgtatcaggatttgtggataaataatgtatgattttaaattaaatgcattggatgaattaagttttgaaattaaggaaatttaaaaattgtctttaccttctgaatcaagcaacaccagagctgagaattggtgaatgaattagcaagctagcctgaaacccattcagctctttgttggggacctgaagtcatgtgttcatttcaactattcctcccatggtgagagggtggtggtgtgtggctctttcctttaccctccccccaagtcagggctgttgtattagtttatcattgctgctataacaaattaccatagacatagtggcttgaaaccacacaaatttattatcttctggccttctgggagtcagatgtctgaaatgggtttcactgggctaaaatcaaggtgttgcctggatgtgttggttctagaggttctgggacagaatctgtcggctgactttttctagctcctagaagctgtctgcactgcttggctcatggccccttcctctatcttcaaaggtagcagtgtagcatcttgacatctctctctgactctgaccctcttacctcccactttcatttacaaggacacttgtgattacactgagcccacccaaaaaatgaagaataatctccccatctcaagatctttagcttaattatatctgcaaagtcccttttgctaagtaaggtaacatattcacaggtctcaggggttgggatgcagacttctatggggacacccggcagtagaaatcacagctgagactctgtagcagttgtggactctaacgctaagagtatcatttttccccccattggtgtaggtgttcagcagtggctgttttgaatcatgcctggttcccatgtcgtttggatccttggcctattgccaggtcagttcccttattactactgcctggttctggatttgatcttctccctgttctttagaggtaacgtgtctgctttaagtcattgcttccttcataagctgcttgcttcttgcaggagacatctttgcactctgagtaccaagcagaccatcttaggacaaccctctcccccagaaaaattgagttctacaagtttggaggaacactcagaatatatcttcccccaaccaggcaacattagaaaacaagcaattgttggggcattatggtaggaaaatgtgtttgccaccagatcccattgtgtagaaatttccatttccatttagccacatttttctcctgttttcttctggctcacaggtgctcaatagcactcacctagttggttttgcacaagatactttgcggtatctctgcttagaatgtcacaccataaatgcagttgactgatctttgcattctttgacaactatagttccatctgctctatttagaaactaatgtaattacttaaactggagaagacagaactacttttgcagcaaagtcaaaacatgcatcaacactcgtctctataattacttcaccaggaaaaaaaaaaaaagcatcctcactggcttttcttacaaatgaagagagtcttccacagtaattggctacttactaagtaatatatgtcagatctgttcctcttaccataaatctagcctggccatctcaccctaggtgtcaagaagtcatgtagacaaaactcacatacttctgttgcatgacacagcattgaagaattatggccttttgagttaaatagatctgggtttgaatctttgactctgctactttcttgctaagtattactgggcaagaacaggggttggcaaactttttcagttaagggccagttagtaaatatgttagcatttgtggaccaaatggtctctgttgtaactactccactctgctgaaattgtgtcatacgtaaacaaatgggcatggatatgttccaactaaactttatttacaaaaataggttgaatttagcccatgggctgaattttgctgaatcttggacaagacacataaactctctaaacctcatataatattcataaagaatattaagagctaacttccagggtattgttaaaatttaatcagatattgtatattaagtgcttggaatagtacctgacacaaagtagatggtcaacataccttcaggtaaatggatggatagataggtggatggatgaataagaaggatggagagaggaagagaggtaaaaagaaagaaaaggaaggatcaaccatattaagattaaatatattgaacaatgatttgccagtttatgggagagagctctccctagctatagggataatggactgaatgaaactaattgagcaggtgactcatgttttgtcacgtggaatagagcaatagcgctatacaggtgagctgcagagacttgtggcatcacaaaaaaaaaggtggttgaaagcttctctgctgtcatctcccctgtcccactgaggagctattttctgtatcagaaccatcctaccttccctctgcctccttataacaacccactgtgactccagggagattattaaaatcccccacggaagtggaggcccagagttgcctatctcctgactccactgcactcccatttgccttctttccccaccctgtgtgtcttgttaatgtccagatggggtgggggctgtgatggctcctaggccttagggttttaggtctgtttctgcaaatgactgacctgttctcccagttgtcccagcaggcattacggatggatgaaaccttgcctataaaagtgtgcatgtgcccaagaaaagacaagacttcacaatatttgagcaaatgacaagcattccccattcgttactgatcatccttagaaacaaactgcagcggctcacactggagcatctggctgtaaaattttgtctctgaaacagactgtctcagattgcaactaaaatgttggagaagctttttttaaaaaaaaaatacgaaagacaggaaataaaactactccacaacactgaaaactagggctagaaattggagctttcttccaaaaataggacatggaattgttctgttgaagcctccgtagatgtgagctcaaatacaggtaaaaggaccgtttttgccttaccttgctaattattagtttagaaacaggacatggggccaggcatggtggctcatgcctgtaaccccagtgctttgggaggccaaggcagaaagattgcttgatgccaggagttcaagaccaacctaggtaacacagtgagacctcatctctacaaaaaaattaaaaaaattagctgggtgtggtagcatatacctgtagtcccagctacatgggcatgggaggttgaggcaagagggttgtttgatcccaggtgtgcgaggctgcaataagctctagcctaggtgaaagagaccctatctcttaaaaaaataaaaaataaaataaaatagaaagaaagaaagaaacatggaaaaacagtctgcctaccacattagtgctacttttcatgataaacatatgattaggtagtatgattaaatggatccagaattttatgagactttaagcatgaagaaaataaaatcgtaccaaaaatctgaaactcacacttttagaatctcctagatgtgcccggtcatcccgggcattgctttcagcagtatgttcattattcagacaaaaaaaagtaaaagatacagaaattgatgaccctttacaggagatcagagaggcccagtgtgataaggcttcacggtaatgtgtagctgtgatttaaatgaatgacagtggttctcatccagggaattctcattaagctcatattctgaaggcagagagttgaggttttggccaaggaacctgagaatttccttcactctcactgctagattggggacccaagaagtaacagatccttagtggtcaagtcgggccttaggaaggcctcccatggcctgggctattgtacagattcaactctcagccctgatgcaccatgatggattccacctgaccctctgtggctactcccagggggcccgtttctccgagctggctcaggccctgtgaatgtaggtcctctctgacttcttggaatcttgcaactaaagaggcctagctggggctggtcaaggcaggatgagaagtctagaagctaaaaagtgtagagggcaatgtagaaaaaaggagggtagcttgctgcatttagtagtgtactgaagaactgattttctacgcttgcaaaacagttccctttggttgttattgagcaaattttggaaacatgcaactgaatagggcagacatcctgtggccagtgggttcttagtctaatcagaaactcagctgtagagtggtaagtgttagaatggagatgtgtgcaagttcaaagggaacagagagcagagacttcttacctaagcttgaaggtaaggagaatcatctgaaaaatgggaagatcacctgtccaagtagcttaatgcagtggctgtatgactcagaatttccaagagatattcagtttttgatagcttttttttcttaaactagatgagcctcaaaatatatacaagtaatttgacttttatgtgaattttttaaatgtttggcttagaaaaatacggtcactgaaaacacaaaagctcgatagttagtctcatgctgttagctgatatcgaaaagtgtttagcatcaagacagccagtattgctggctctattctggttttggatggattgctggcatccattctgattttgatgaaaagttccattttgtagaaatgttctacaaaagttccatttctacaaaatggaacttttcatcaaaatcagaatggattaggtaaagcatatttgtgaacaagcactcaaggtaggaatatgtaaaataaatggactcatttcagtatatggcccttccttgtgagtgttcaaccattatcagattatcaatcactgattacctgatctccgagttgactgtttttctctctcattgtgttggttgatcctgtgcccatcaccacttgttgtttctaataatgttcctctgagaattatagactcacccacccatccatcacttgggtctctttacttctctgtgccctggtgttctgagattgagatgtggcatagccccagctacctctggagttgaggttgaagagagtggtaggggcagaggatgggagagggaagacagagactgacaaacagccactcagatggaggaacagtctgctacccagactcaatttcacagaaagaattaaagaaaaaaaaaaactagaaaaggttctggtatgtttcatatgctaggtgctctatatgtttcaattcacttcatagtacatacctattcattcctttattcgttctccctctttcatttttcttctttctgacacacgacttagcaaattaagtctttttaaatctctggtttatgcataataagaacgtgccccagagaaattaaacatcttctccaggaccctggagctagtagaggttaagctggacctcacagtgaggactttcagctccagaacccaactcctttgccattgtcccttgtcccatccattttactgcagttgcagaccactgattctgcagttatttgtggggccgctgtgtcagtgttcagctttttacctgctttgaaagaaagacatttaacagtgtcttgttaaagagaatgcttggacctgaccctgtctccttttcactttggctgccaggatgcctcaagccaaatttggaacttgactgtggtacctctggagtcccttagggctgacagatgtgtgcccttctggccaaggtgttcctcaccgtatatgctagtcctgactttttacgcttgtttgcattttgccattgtaggctgcctcaagccctttgtggaatgtggctgtgaataaataaataaatagctaactgaatacaaaatgtgttatgcatgtatccctaatgattgttaattaactatgatttgcagctgctcccatatttcccaccactcctggcccctcaaatctggatttctgaacatgcctggcgtttctcctttactctcttcagaacattcagaactgagttgggttatggggaccaagactctttccccatcctcatttcaacctaagcagttctgaatagtttgtgcctttgacacacttctcccaaagtgctacttgaggtctagccttttacttttaaaaatcgttaaattttttcaatagtttgagcacctcaataaatgcattgggctacttgcaatgttaataactcatgctgttctaaccttatgttcctgataaaggaattctctgccgtttaaggctctgggatgaataatagctgagtgtttctattgtcctcttaaaatggagattactatatgttgaatcacaacagaactacttttttatagactgtgaatagcatacaggtccatcatgttgttgcaggcagcgccaacagaatggataatggcaagccaattattataaataatgccttgtttccctttggcccctgtgcaaatttcacagagcaggattctatgaaaggctggtaggttaagttaaatatgacagtgttcaccccagcacctaggacagtgcctggtacaagtcatggcttcatgctagctgaatcagaatctgagttcagcagggttttttttttttgtttgtttgtttgtttgttgctattgttttgttttccttcgtggggctggggcaggtgtggcagggtatgagctcaggtgtattgcagagctcctagacagatgagcagaatactgtttggtgaggctggttgcagtagaaccaaaggaggaagaaaacagaaagggacattctagcagagcaaatggggctaaggttagcctgagagaagagccaaggctgggtgtgggaacacaagtccaggactcagagttcaggaaaatcaggagtctcctgaagtatgggtatggagttggctaaaacaaggggtcccagaagaagcacgtggatgaagtgaatatgccagagtttctgccgggtgggatgttgacatgctttgcaaaaattccaataactcgaaggccctagcagaatgatgccatgtccctcaggcctctcacatggagatggaataagcactgaattctatcaccatttcatcccattccgtagagtttaaccttgagaaagtgtaactattctctctaaaccttagtatccttgttttaaaaatgaaggtgctgaaacaggagagttccctgcttcccccacatgacatgtgacaggggtatgcctctctgttcagctgccacaagctcaaaccccttacgggagggggagcacacagacaggcaggtttaggagccagggcaaggactttggcctctggccccctggttgtctctaagggtgggtgtctgcgactcctgaagcccagcgggcatgttacagcatgctcttttggctttgcaatctgcagacagctaaagttaaccagctcagtgccctcttggcacccgggttcttgtttggagtctaggaagaatgaggctgcacatggacttaaagagtgaatgtgggggtctttttgagtggtggaggtggctctccgtgggatggatggggagctagagggggaatggagtgggaagatgattttccttcttttctcttcttctctgctgccccattttgccattcgtccgtgcatttctttctggagcctggggttcagggtttatatggatgcaagatagggggacatagcaggccaaaaggcaactttttggatgcaaaaacaggaatgcctgttctcactgagggctgtgggtttcttggcttgaaggtggggggcctttgcccgggaactgccttcttcaaaccagtatttccctatctcctgtccgtatcagtgctggactccatgttctgtaagatccatgcagtttttttaccccaggctaacatgcattttgaagccatgaacttttctgtttctaatcttgttttttatttcgacatctattgttctacactgacttctatttaacatccagctactgtactagcaattgtaattccacccaacaatggagccaaagaccaagctgagtggattgtgggaagtataatttaatgtaaatgcctcccttaaaatttaagtctggccgggcacggtggctcatgcctgtaatgccagcactttgggaagtcaaggtgggtggaacaggaggtcaggagattgagaccatcctggctaacaaggtgaaaccccgtctctactaaaaatacaaaaaattagccggcatgttggcgggtgcctgtagtcccagctactcgggaggctgaggcaggagaatggcatgaacccaggaggtggagcttgcagtgagccgagatggcgccactgcactccagcctgggcagcagagtgagactccgtctcaaaaaaaaaaaaaatttaagtccatagagaaaaagctacatgtactccaaagctagcattacacaaatcaatgtcatacccatgattttcagtaggcagtctccatatgccaggacactggtagaggaacaatatattttctaaggtagaggcatattcaaatttaattcatgttaaggagagccctgtcctttaggatgtaggtgtgcagaacggttagcaaagtgtcaaggaaatttgaatctgagagtactttttagagaactatgaaatacttcaggtgactgtcctgacctctctcatttcacctctgcttttcttaaccctgccaaaggggtctttgcccttcctaagtccatcactcagcctactgctattagctgttctctttcataactattattggatgtaggtcacccatgggagatgtaatattagagaggaatgtgggcatctgcaatttaggagaaaaaagtagactggaagtagacatttgagagtcaccaggatctaggtagtagtttaattcatagtactagatgagatcagaaagagaagggaaagagcttgaaaacaatgccaagaaatgcaaccattgaacatctagggagtggccagcacagcaaatccagaaggaaaactgagaggctataggatcactcagaagccaaggaattccatatttaaaggaggatgaggtcaatggcattgtatgcttgccaagcggccccttaagagggcaatggaggaatccatggcaggagaatttacaatccacaggtgatggcaagagtctgatagaatgggttgaggacaagaaaagtggagataacttatttttctcttttgatgaatttggctatgtggtggggacaggaggttgttggagagacctggagataagagctatgggtgttcttgagggaaaagatttggacatgtttaaatgctaatggaaaggagccagtggagatggggaggttgaagacagaagcaagagggtaattggtgtgggcaaggcccgaggagctggagggcaggcgatctagagcccagggggaaggatgcaccttgctttaggacagggcagagggggaaagaaaggaggcaggtgatatggtttggctctttgtccccacccaaatctcatcttgcagctcccataattcccacttgttgagggagggacctggtgggagatgattgaatcatgggggtgggtctttcccatgctgttctcctgatagtgaatgggtctcatgagatctgatggttttaaaaacgaaagtttcgggggaggagccaagatggccgaataggaacacctccggtctacagctcccagcgtgagcgatgcagaagacgggtgttttctgcatttccatctgaggtaccgggtttatctcactagggagtgccagacagtgggcgcaggccagtgggtgcgcgcaccgtgcgcaagccgaagcagggcgaggcattgcctcacttgggaagtgcaaggggtcagggagttccctttcgaagtcaaagaaaggggtgactgacgcacctggaaaattgggtcactcccacccgaatattgcgcttttcagaccggcttaaaaaacagcaaaccacgagattatatcccacacctggctcggagggtcctacgcccacggaatctcgctgactgctagcacagcagtctgagatcaaactgcaaggcgacaacgaggctgggggaggggcgcccgccattgcccaggcttgcttaggtaaacaaagcagccaggaagctcgaactgggtggagcccaccacagctctaggaggcctgcctgcctctgtaggctccacctctgggggcagggcacagacaaacaaaaagacagcagtaacctctacagacttaagtgtccctgtctgacagctttgaagagagcagtggttctcccagcacgcagctggagatctcagaataggcagactgcctcctcaagtgggtccctgacccctgacccccgagcagcctaactgggaggcaccccccagcaggggcacactgacacctcacaaggcagggtattccaacagacctgcagctgagggtcctgtctgttagaaggaaaactaacaaacagaaaggacatccacaccgaaaacccatctgtacatcaccatcatcaaagaccaaaagtagataaaaccacaaagatggggaaaaaacagaacagaaaaactggaaattctaaaacgcagagcgcctctcctcctccaaaggaacgcagttcctcaccagcaacggaacaaagctggatgcagaatgactttgacgagctgagagaagaaggcttcagatgatcaaattactctgagctacgggaggacattcaaaccaaaggcaaagaagttgaaaactttgaaaaaaatttagaagaatgtataactagaataaccaatacagagaagtgcttaaaggagctgatggagctgaaaaccaaggctcgagaactacgtgaagaatgcagaagcctcaggagnnnnnnnnnnnnnnnnnnnnnnnnnnnnnnnnnnnnnnnnnnnnnnnnnnnnnnnnnnnnnnnnnnnnnnnnnnnnnnnnnnnnnnnnnnnnnnnnnnnnnnnnnnnnnnnnnnnnnnnnnnnnnnnnnnnnnnnnnnnnnnnnnnnnnnnnnnnnnnnnnnnnnnnnnnnnnnnnnnnnnnnnnnnnnnnnnnnnnnnnnnnnnnnnnnnnnnnnnnnnnnnnnnnnnnnnnnnnnnnnnnnnnnnnnnnnnnnnnnnnnnnnnnnnnnnnnnnnnnnnnnnnnnnnnnnnnnnnnnnnnnnnnnnnnnnnnnnnnnnnnnnnnnnnnnnnnnnnnnnnnnnnnnnnnnnnnnnnnnnnnnnnnnnnnnnnnnnnnnnnnnnnnnnnnnnnnnnnnnnnnnnnnnnnnnnnnnnnnnnnnnnnnnnnnnnnnnnnnnnnnnnnnnnnnnnnnnnnnnnnnnnnnnnnnnnnnnnnnnnnnnnnnnnnnnnnnnnnnnnnnnnnnnnnnnnnnnnnnnnnnnnnnnnnnnnnnnnnnnnnnnnnnnnnnnnnnnnnnnnnnnnnnnnnnnnnnnnnnnnnnnnnnnnnnnnnnnnnnnnnnnnnnnnnnnnnnnnnnnnnnnnnnnnnnnnnnnnnnnnnnnnnnnnnnnnnnnnnnnnnnnnnnnnnnnnnnnnnnnnnnnnnnnnnnnnnnnnnnnnnnnnnnnnnnnnnnnnnnnnnnnnnnnnnnnnnnnnnnnnnnnnnnnnnnnnnnnnnnnnnnnnnnnnnnnnnnnnnnnnnnnnnnnnnnnnnnnnnnnnnnnnnnnnnnnnnnnnnnnnnnnnnnnnnnnnnnnnnnnnnnnnnnnnnnnnnnnnnnnnnnnnnnnnnnnnnnnnnnnnnnnnnnnacagggatgccctctctcaccactcctattcaacatagtgttggaagttctggccagggcaatgaggcaggagaaggaaataaagggtattcaattaggaaaagaggaagtcaaattgtccctgtttgcagatgacatgattgtatatctagaaaaccccattgtctcagcccaaaatctccttaagctgttaagcaacttcagcaaattctcaggatacaaaatcaatgtacaaaaatcacaagcattcttatacaccaacaacagacaaacagagagccaaatcatgagtgaactcccattcacaattgcttcaaagagaataaaatacctaggaatccaacttacaagggatgtgaaggacctcttcaaggagaactacaaaccactgctcaaggaaataaaagaggatacaaacaaatggaagaacattccatgctcatgggtaggaagaatcaatattgtgaaaatggccatactgcccaaggtaatttacagtttcaatgccatccccatcaagctaccaatgcctttcttcacagaattggaaaaaactactttaaagttcatatggaaccaaaaaagagcccgcatcgccaagtcaatcctaacccaaaagaacaaagctggaggcatcacactacctgacttcaaactatactacaaggctacagtaaccaaaacagcatggtactggtaccaaaacagagatatagatcaatggaacagaacagagccctcagaaataacgctgcatatctacaactatctgatctttgacaaacctgagaaaaacaagcaatggggaaaggattccctatttaataaatggtgctgggaaaactggctagccatatgtagaaagctgaaactggatcccttccttatgccttatacaaaaatcaattcaagatggattaaagatttaaacgttagacctaaaaccataaaaaccctaggagaaaacctaggcattaccattcaggacattaggcatgggcaaggacttcatgtccaaaacaccaaaagcaatggcaacaaaagccaaaattcacaaatgggatctcattaaactaaagagcttctgcacagcaaaagaaactaccatcagagtgaacaggcaacctacaaaatgggagaaaattttcgcaacctactcatctgacaaagggctaatatccagaatctacaatgaactcaaacaaatttacaagaaaaaaacaaacaaccccatcaaaaagtgggcgaaggacatgaacagacacttctcaaaagaagacatttatgcagccaaaaaacacatgaaaaaatgctcatcatcactggccatcagagaaatgcaaatcaaaaccacaatgagataccatctcacaccagttagaatggccatcattaaaaagtcaggaaacaacaggtgctggagaggatgtggagaaataggaacacttttacactgttggtgggactgtaatccagttcaaccattgtagaagtcactgtggcgattcctcagggatgtagaactagaaataccatttgacccagccatcccattactgggtatatacccaaatgactataaatcatgctgctataaagacacatgcacacatatgtttattgcagcattattcacaatagcaaagacttggaaccaaccgaaatgtccaacaatgatagactggattaagaaattgtggcacatatacaccatggaatactatgcagccataaaaaatgatgagttcgtgtcctttgtagggacatggatgaaattggaaatcatcattctcagtaaactatcgcaagaacaaaaaaccaaacaccgcatattctcactcataggtgggaattgaacaatgagatcacatggacacaggaaggggaatatcacactctggggactgtggtggggtggggggaggggggagggatagcattgggagatatacctaatgctagatgacgagttagtgggtgcagcacaccagcatggcacatgtatacatatgtaactaacctgcacaatgtgcacatgtaccctaaaacttaaagtataattaaaaaaaaaatagaaaaaaaaaaaagaaaacaacaaaaaaaaccgagagttcctctatacaagctctctctttgcctgagaccacctatccacgtaagatgtgacttgctcttccttgccttctgccatgattgtgaggcctccccagccatgtggaactgtaagtgcattaaacctctttcttttgtaaattgcccagtctcaggtatgtccttatcagcagcatgaaaatgaactaacacagcaagtaaagggaaataattcattgcagggtggtcagaacattcttttgggatggcctctgtttgcttctgtgaagtaggaggtaagatcatttcctgaagttgaggggatagaggagcatggtgaaagttgaaaaaagctgcagtggggaatagaagggggtggtgacaaaggagtgttagctcggctgacactggaacccacgctatcacttggagattgtacagttttctccagcagtgctcaggaccctgattggggcataggttcaaagaaagttgtggttggattgatacaaggtactatggacctgaattatatgttgaagtcctaaccctctgatctcagaatatgaccttatttggaaatacggtcattgtgcatgcagttaaattaagataaggtcattaggtgtgtgtgttgggggtgttcaaatccattgtgacaggtgtccttacaaaaaggggaagtttagacagagccatgcacttggggagaatgctatgtgaaattgaatgcagagatcagggtgatgcttctgcaagccaagaaacaccagagattgccagcaaaccaccagaagctaggagagaggcatggaacagattctttcacagcccttcaaaggaatccaccctgctgacaccttgatcttggactttcagtttctagaacaataggatgataaattcctattgttaagcccccaccccccacccagtctatggtactttgttatagcagctctagcaaactcatacacaagggatgtatatttttttgtccttttccttcttttccccttcaagtggttgtgaaggactgaaagcaaacgttttgaaagcacattctaaaagtattattaaagagatagctcaagaaatattcaaggtgggtaggaaaggagataaaacagaagagactgaatagaaaggaaaaggaaagactaagggatttagtgttgaaattttctttcagcttagacagttgtaattgtgagtagctcatagaatctgtctcttgggaagtctcaaccctattcaggatttccctgtaaagggtaatcttagcctccaggtctgtgctaaagtgatcactctgctactcctcaaattagatctgcaacttagatcatagccaaggtatttgcaaataatcatttcttgttaggcattgacttacatttacatatgataaccagagatcttatatattctcagagggaagtttcaagttacctaagctgtgtgtgtcttcaaagagctgcataactagtatggatttaacgggctattcgcccagtgattcagcatttgctaggttccagttctcagagaatttgctcattagcttcaaaagacagctttttaatggaacaaaataaggggcactgcaagttgtggtttcaaaagttactgtgattaaaatcatatggacagctgctgttcagtatggcatcacctggtgtgaatgaaaaagtgctcactgccagaaagccattgggctgtaaattatgtttactgtacaactggccgcagtctgccaagtttaaagtttttggaatggtccatgaatagactgttgagcagaaacaactttttcaaaaaaagtttttgcttcatggaagaaaatgtggaaaatacatgaaaataaaaatctttttaaaaagcagataatctcttgagtgttaacatttagggtgtctatccatctggtcttttttccccctatgcataaatatacatacatacatttactaaatgggaatcatactgtaaatacagttttgaaacttgctttagttaacatatcctaaccacattcccacaccacagaaacactctttccatggtggaccatggtccattttgggggttatcataatttatttaatcgattgtctctctttggaaattttggttggttttagtttttttttttctgttaaagatgattcagtgtatattttcaatatataatgtcttaaaagcttgaggcttctgggtttgcatgataatctgttgcatgtcagccagggaagctggctggcatctgtggagcagacagctgtctactactgagtccctctaggagacttttttgagcttgaaatacaaggtcttttaggaggagggcactgtctaatatttacttttacaccatggggagggatttgatggaaacagaaatgcattcagaaatggctgcatggaaaatgggcttaaatgcaaagagtgatgacgtgtaatgtaacaggggagtctcagctgctgcctgggcttctgtcaagttgaggctgtgactcacagaaggggttggggtggggggtgtttctcccctcttccccattctttcagaatctccatgacagaaaatttgtaaactgttcttgctgacagttgtgcaaaatgaaaagctcggtggatgtgtggagaatacattttcctgactgctgttaagcatttgacaaattgggagttttgtcatatatcgaagaacaatggtgggagagtagggaactgtgtgcgtcacataaatacaacacacctgacactgatgctccctgcatcagttgtcttcctgtgtggtggggaaggggaagagtcaggagatgggtgggtccagcaggtgctgacctcattcagcaggaggctgaatgatgcaactcacgaccaagggcccatgtcagcatgggtcttaggaggtgctaggttgtttagggtcctgttcattacgattttttgaaccaaagggagatttcctggaagtctgatgtgggagatccctgaagccattgatggaccaggcaagagcctcatgtgctccaagaggtgggtgaaatagctatggagccaggtggagcctagtggggctggatctgggcactgatggaggggttggggaagagaagcatgttggtttatttcatggcagtctgggctggctctcacccttgacagaaggaatgcccacagccaggaggggatggttccatctcaaggctcagggaaggaaggtgagtttggatagaaagttcagtcgctgtcattcctgaccatctcagcaatgagtcacacgtggaacacaaagataaacacatggagagggctatgcaggtggcgtgacgggcctgagagtggactgggatacagggaagtgggagaggtgtcaggcaaacctgacaacacatctttatgcctctttaccagctttgcaaccttgacaggctcaacctcttggagcctcactattgtgatctgtacattgggatggtagtgcctgcccttatggcagcgttctgaagatgaaatgagataacataaaagaagcacctccccacccagtaggatggccaccatgaaaaagacagataataacaagtgttggagagaatgtgaaaaaattggatcctcatacactgttgttgtgagtgtaacatggtcagcctctttgaaaagcagtttgggagttcctcaagaagttaaatgtacagttccatgctcagcaattccactgctaagtccatatccaagataaatgaagacatacatccacaggaaaccttgtacatgaatgctcatagcagtagtattcatgatcaccccaaaatagaaaccgcccacatgcccatcagctgatgatcggataaattaaatatagcatatccatacagtgaacactttttccacaataaaaaggaatgaaggcatacatgctgcaacatagacaaaccttgaaataacatgataagggaaagaagtcagacacgaaagactagtgtattgcaatgttcagaataggtaagtctatagacacggaaagaagattagtggttgcctaggcaaagagtttgtgtggaagtgaagggtatggaatttctttttggggtaatgaacattttctaaaattgacttacaatgatggctgcataactatgtgaatatacgataattcactgcattatacactttaaatggatgaattgtataattgtatggttgtgagttttatctcacaaagggtgttatcccccacaacaacaacagaaaaagaaaaaatgtgcctgacacacaagcaggtgacttatttatataattctaaaccccttcctgtctcacagattagtttggaaaaggttacagggcttcagttctcaggttttcaagttcaaatctacatatttcaggtcaggcatggtggctcacgcctgtaatcccagccctttgggaggccaagatgggaggattgcttgaggccagaagttcgagaccagactggtcaacatagtgagaccccatctcaaaaaaaaaaacaaaaaaaaaaaacaaaacaagtaaacccgcagatctacatatttatgtccttaacatgttgtctgctctccaaaaagagacactgagccttcatttaagccaaaagtgctcacaagggtgacaccctttgtggaatgagtgtattgcagaaaatctgggagtctgagctaaaagtctaagtttctatcaaccaggtttttttccccccatttctacagagagcacttttattcacgtgaaagtgtctatgttgagtctgtgtatcacattgcaaaatagtcgctgaaaaaagctggtgttccagagaaggaaagttcttcccattgtctaacttgagtcttcctgcagtaattgaagcctgcttcccgccacccatctgaattctgccatctgttgaggttggatgcttggagtcaaatgaaataagtgcctccttggagaacagctcctggaggccacagcacatttgtcacatgtcactgggatctgcatatggaggtgaaatgtatattttaaaatgtgctcacgctcggctgcacattcatcctgttctgaatgtgtttatccaattgcccatcatagacccgccctggggggagtgggggtcagctgatctgctcttatttgtctgccagcctacagcctccctagacagcacacatccctgggccgccctgttccttgcccttctcctagaggaagagaagctggaaggctctggtttgcagctggttactcagctctaaagatggattccatatcttggtagaaagaacgaggcagcccagctgctatagcagccagacctgggagcaaagagtcagtgttggatttggagtcagcagcctccttttgaacactggctgtgacacttagcagacatgtgacattggccataacaagtgtcctctcgtggcttcagttttgtcatcaataaataaaggcaaggacctaggttccttaaggaccctaaaacttatgcctcaaggatgaaaatggtttaattcaaagtgttgggggctgggtgcggtggctcaagtctgcaatcccagcactttgggaggctgaggcgggcggatcgtttgcggtcaggagttcgagaccagcctggcccacatagtgaaatcctgtctcctctaaaaatacaaaaattagcccggcatggtcatgtgtgtctgtagtaccagctacttaggaggctgaggcaggagaatcacttgaacccaggaggtggaggttgcagtgagccaagatcacgccacttcactccaacctgggtgacagaaggagactctgtctcaaaaatgaaaagaaaaaaaagtgttggagtgttctgtattatcttcctcatagagacggggtgggtgtctgggactagggtattcaaactcaatcctataccaaaccctgacgtccttccctgtgatggctttaaaacatggcccccaaatctttgacactcttcccatcaagaatgtctctgatcccttcccttgggtctgggctggctaaaactgtaccttccccttgagaaaagttggaaccacatggcatttgagggtggtctcttaggacacttgttcccttgaagatcttctccttcagaactcactctgtatgcggtgagaagcctggaccccatggcaagaccctaagtccgtgctccaggtgacagtgccagctgggctgaccttcagccatccagcccaagcacgaggcgtgtgagaaatctagttggaaatcaattccttcagctccagcagctccagatctcaggcatccaaatctcccctggctgttccagtcttcccatttgatatcccagacaatattgagaaaagcacgccatctctgctggatcctgtgtgcaaatcctgctatgttggaacatcccagcattgtttatcccccagacagagtctccttcctcctgccctgccccaaatcaaagctattatccaaggacaatggagggattttggtgcttttcattctgcaacagagaggcagctttgacagcacgggtatttacatcacgttctgggtttccagagacctcatattcattaatgaattaatcctttctggcaacggtcctctttatagagtggcatcatgatgtgtgttcatcagacaaggggactggggcaggggctgtggctgcccatgatgcatgaggcacctcagctgtggctattgagtacttattccggagacatgagaccatgaggtgccagatgcagagtttgggccttggagcctggagtctggatgcaagtctaccctctggttattccttggacagacagctttactggtctgagtctcagtttcatcatctgtaaaatgagtggagatagtactcccaccagggcatagatgattgggtggcacatgaagatgctctgtaagctgtgacacacggccagtgtcattgcttctggtccacatgaggatgcccttatgagctggtgtttcagggaggatcagcagttgcacctgggataagggtaaggctgtgggcactgtgagaccctctcagattccccgggcccatgataatgaagaagacccggaagcaaaagcaagcgcccacaggtccctctgcctgctcattcaggctcccccgctgtgcactcccagccccatgcaatccgcccatgcccacaccctcatgctcatcaccctcacatcctggctttcttggttcaggcatgttcagggcttgttttgttctttattttgttgttttattttcttgtgttcaggaagcatttcattgttgctccaagtttaagaattttcactgatgagtgataaggaatcaacacttcaaagcaatgtcttgcgtatccctgctcagcctctgaatcttgggtttggctgacatattaatatatttctgtgcagtcccagtggtcattccgttcatgattggtggctcagtcctaacttccagttccaagatctggcctttacacaggaagctgcttagaatctcttcctccacctcccatttttttaaattgtggtaaaatacaggtaacataaaatataccatcttaatcatttttaaatgtagagttgagtagcgttaaatacactgataatgtgcaaccttcacaccatccatctccaaaactctttttcttgcaaaatggagactctgtgtccattaaatacgaactcttcatttccctcttctcccaccccccggtagccaccattctacttcctgtctctatgattttgactactcttaagtgtctcatgtaagtagaattatataatatttctctttttgcgattgacttatttcaattagcttaaggctaatctatgttgtagcatgtgtaagaatttccttcctttttaaggctaaataatattttattctatgtatgtgccacattttaattattcattcattcacccatgggcacttgggttgcttccacattttagctgtgatgaaaatttagctatgatgaatagctgctgtgagcatgggcatactcagtgccacttgtagttcaggatgagtggccccatctaatggaaattcagtggcaactggacacaatgcttctccatgctggacagtcatcatggcagaaaaggcagaaaaaaatgtcgggggtaatgctcaaatgaccatgtagagcaaataaattaatcacattgagtgtgagggaagaaagccaaaaaagtggggatcccagctcaaaagctatttttaaatcttggacaagtaactcagtttcttggagcctcagtttcatcatctgtaaaatggggatcatgctttctatatcacaggctcatttctctgtcgtatgtgcagttcactgacagaatggagtgaacatgttttatcaaccaaaaggtattatatgaatggcggctgtcattcccccagggcctggcacatagcaggtgctcaaaaagtattggcagaattaattattgctgttttctttgctgaaatctgtgagcagttggcaaggctgtagcccccatactttttctgttctcattctcttgccctcagattggctttgctgaggtcccagatctgctgggctggccctaccacatcagccttggtaggtgcctgtgtgtgtgtacatgtctccctgcaagagtgtgtggcccagaaggtcagttctatttatcttggggtggaaggggtccctcagggaattagaggtgagtgaagtggagtcacaaaacacagccagagaaaaatctgggcccagagaagagccaacggggctcacaatgtggtctaagccagcatttctcaacatcgtgcacaagaatcactggcgattctgttaaaggcagattctgatcctgtagcctgaaattcttcatttctgttctactgcctgcagtccaccaaccacactttgagcagcaaggctctgagaccatgcctccatcaggctcatgaaggatcgtggccacatgacatttctgggtcttgcgccacatctatagaatctgactctagggccagggccctggaacctgcatgttgacacattctccaggtaattctgatgcatcctgaaacctgtgaccctctaatcggtggactgaggtaggaggctctgggctcctgtaggagggggagagagcccgtttcctggtatccacattcctccccacagcagcatccaatggttggttcctgtgcagatcggtctttgctcacattcttttttatgccagtttctgaaagccacaaccacttaaatcaatcatttgcaaacttcaccaggaacaccctttgctccaaggtatgaagcatatttggataagatagtgagacatttgtgaaaattgaggtcgagaatcgatggctgaggctgaggcattagctcagccatgattactcatctagcccttgacctttctgcggagacgtctaagaagtgagtaaattaacaccagcagggagtgacaagggcctgaagacctgcagcttttctcactcagggactgatgagcagaactgagcctgggatgtcagtgttaccaggccccccttggcttttgaatctctttgcctgcccctaagcaagggcagtgagctcccctactgcaggctgtgtcctggggtcagtcctggcctgagcagaaagtggctgaatggattcagccatgggtccagctctgaccacgtgacccaccttcacctgctccggggcaggtctaactggattctgaatggactcctcaggcattcatagaggcctgtgccttgcatgtgcctctccctgtagtgcttgggtcacgcctcactccatgagttctactttcatctctgccctctccaaccgacagagactctgagatgcttttcctcctttgaccttggagtctcacagcctatatcagacacccctgctgatagcttgcctgctgtcagcaacacaaacccctggactgggtttcttgtcaatgcctgaaacaggagtcaccctctcagcacacaccaagcctcaaggggggcctgggtcaactgggcaggcccctatcatgtttcatgagccatgccagtgcaggccatgccaggcaaagtatggtacaattatggaactcaatgtcttcggggtatagaagagagatatagaacatcactgggcctcagttcccccaactctaaacccttaggaaggcttattgattccaatgagtggctgggcccagagctcttggggtgcaagcatctccacctagctccctagtggatgtgtgcatgagaagaatatgaaaatgagagaacctcttcctagcatgttcttctctcaccatagccacccacattagtgctaggtaaaaaggaacacaatcaggagaaaaaaaaaagagaactaaatctgctactgaggcattgttctgggatattatggactctcttctttaagagccaaaagcctaactcacagtattcatgagctcctggggatccaaataaaccagattcctgtctccagagggatcgcatggccccaccatctcatgcccaacatcagtaattcagatgagtatcaaatgtgacaggcatttattttaacagagaggaaggggaagacaaaatatcataaaatgtgtgggttttccccagatgactctgttgaaaaaaccaggaaatgcagagcggggggacaaatggaggagagatattaactagaacattgctgactcaaggccgtccagcttcagtgggagttctgattaggccccatgtctgcctgatgccacctgcaacatgggctccgcatgtgccaagacactgagaactgtttgccgacacttggtgtatttgtcagtgatcttacttttcagtgtatttatgtgctaatcttttattattggatttgcttctacaaatatgtttttaccataagacaaagggaaaaggaagatgttggctctgtggcaattgttttgtctggattttctaagggagccccaggttgagaagagctggatatgcatggaggagggagtctggaaggtgggtggagagtgatgactcactgtttgcgccaatatcctctcctggatgtcttgggaaacacatctacggggataaagaagaaatgtcattcttgtccgtctatggagtgaagctttgaggtctaacatttatcacaatctccaggttccacttctaaatgtattccactccttttatccattcttcacttcttatcgagattgagcttctgaaaacataaatcacatcatgccagttccctacttaaaatgccctaagagcttcctattgcacttacaatgaaatccgaactccttgtttatatggcccacaaggcccagcaagatctagtcgcaccagcctctcaaagctcatctccttctattctcctggccatgcactatgctccagccgtactggccttatttggtttcctagaaccctctaagttttttgcctgtttgcgttttgcacttgtcatttcctttgtctaaatcgtttgtcccctctccaccccacccctagccccctggatcttcacttggctggctgatgctgctcatttgctcattttagtctcggctcaaatatctcccaggccagtctaaagcagttctctccctcacaccctcctccccagcataccattactacatcactcgtatctcctgtttattgtcttcttgcgctgattgtctctgaaattgtgtgtgccattggtgtatttgccttttaacttctgtcactcatcactagactgtaagctccgtgagaacaggaaccttcccaggaccccaggcaatgcacggtatgtggttggtgctcattaaagaattgttgggtaagtgaataaatgaataaatgaatgaggagtgaagggaacagagcacccctctgttctgccttgggacttcccatttcagagcatgcaggacatttactgactcttaagtcttaagtgtttgccaaggtactgtgaaatgtttatcatttccattttacaaatgaggaagttaagatttaaagaggttattcaatttgcccacaatcatataagtaatttggcacagccaggggtggaaatcagttctaactgactgtgaagcccctgctccttgttctgtcaccatctagtatttagcattgtttgtggggtggccaggaaggcttcatgaaagaggagcatatgtagctataggagaaaaaaagaacatagtggtaagagtatttgctctggaatcatgctgcctgggttccaagcttggctttgcccattcctaataatgtgacctgtagagtgtcctaatgtcactatgcctcagatctcccctctgaaacatagagatattgacagcatttccctcacagagttgtcaggagagttaaatgaaaggatatatagaaagccgtttgaccagtgtccggcagaaagtaagcactatcaaataggcgtttattacccttatgattattatcccattctacaagtcactttgcatgttgctgaatcttctgaggggttcctaagaacaatctagtagcatgagggtcttaatggaaatgctccagtctctcccaagacttgcaggagcttttaggagtttctctgttgcctgtgactttgcaggaaagtggtgatgtgctgcctgttgtgcacaaaggaacataaactttaaaagcagagaagaaaatgaatgtgttagtggcccagagttgtgggaaaagccacccactaaattacatttctgtaccaaaaatggacttcaggcaaagtgggaatgaacgacattgggatggcaaagacattgagaagcagagccggtaacaaggcatggagccctgtattatttctggtatcaaggaatgtgtggtttcattattattttcataaatggtctcagttcagtttttgttgcttgttattcacacccagggcacctggtgttcaccatgcctgcatcctgcccggcacagacctccgcctgacagtcagtctgctagccagaaattgatagctagagacaaaagagtgccagagatgttcttgggaaccagcacacctaaacatgctcgtttacagatgagaaaactaaggtcatgatgcaaagggacatttatttattcattaatttagtaatgatttattgagatgtattcattaatttagtaatgatttattgatttattgatttgttgtgctgcgtcccaaactaggcactggagaaaaacaaaaggatccttttcttgtagagtaaaccatccctaacgaactcttatagtagactatttaatggaggtaacatgtaaaaagaccaagtctgagaattacaagtcttgagttgcagtctaaactttgtatctgactagattaatttactgagcctcatgtttcttgtgtgtaaaatgtggaagatggtttctggccttcaaatctcacaaggattttatgagcacccagataatcgtgacatgtgctgatgcttgatggcctacaaagcgatttgtagataatgcttttgtgacgggtgagatggtaatttgcaatcacttgcatccactggaataatataatgggaaaatgaaaggggtgatggtgcaggtagaaggcagattgtatgttggagatggagcagagaagagccaaaggtgaccctcaaatttcattctgaaagggggtcttttgcactgtttggaatcaatgggaaagaattttccactatggagagtagctcattctatcaggcgggagctaccactcactagtacataacatggtagatgtggggatggagctgagcatggtactgagacaaggcacagcaacctacgaactcagagtagtgtgagagatgcagaatcataaacagaaaggttcaatgcagtgccttgacattgactcaggacagagggatccaaacccaccctgttagaaaggggttgaagattgccaggaggtgtactcacatattccttgtggtattattcacaatagcaaaatcatgaaaccaaccttagtgtccgttaacagaggactggataaagaaaatgtgttgcatatataccatggaactctattcggccataaaagaataaaagtatgtattttgcaacaacatggttggaactggaggcaattgttttaaatgaaatgactcaggcacataaagtcaaaaatgctctcacttataactggtagctaaataacgggttcacacaggcgtacagagtggaataagagacattggaaaccctaaaaggtaggagggtgggagcagggtcagagatgaaatactacctatcggcgcaatgtacactatccggtgatatggacgctaaaagccaacttcactactgtacaatatatccatttaacacaactacaattgtacctttaaatctataaaattaaaaatgtaaaaaataataataataaaaaatcccagccaggtgtggtagctcacacctgtaatcccagcactttgggaggccaatgcaggcagatcacttgaagtcaggagttcaagaccagcttcgccaacgcggtgaaaccccgtctctactaaaaatacaaaaattagccagactttatggcgcacacctgtagtcccagctattcaggaggctgaggaaagggaattgcatgaacctgagaggcagaggttacagtgagttgagatagtgccactgaactccagtgggggtgacagagtgagactccatctcaaaacaaaacaaaacaaaaaaataacaacaacaacaaaaaccaaaataagtaaaattttaaaaaataaaaatgaaagatcccccaggacagatgatgactgagctaggttttgaaggctgcagagggctgaactagttaggttacatctggaagggcaatcaaggctgagaggacaacacaaagagtgatgtagtaagcttaggaaactggatgtggctccatggagaggcctggggcataagtgggcacggtggtagggaccattttgcagataatttgagtgccaggcagaacctgagctgtgcaaggggtggtgtttgtggaaggctgtcttgcaatggtagcttggtggcatttgattaagatcccctgattacaaatgtaaaattaatgcccagagtcagtcttctccccattgtacatgctctttgacatcactcatggctttatgaaatgtgcggccagttctgtgtaaagagttttcagagtggggatgcaggcagcctgcatcatccagggaaggcaaatgaaggacaaaatcatcccactgcagagggaaccaatgcaaatgagcatcttcccagatagcagagtagcagaccctggagctccttagcctatgcagtgcctgacactgtaactcaaccctcccattgcaccccatctctctgggcttgaggaagtcacagaatcctaaggcagggggcatttcatccctgaggagggatagatgaattttactcagaagacatgcatcaattaagctccggtggtttgcagaatcaaccctgtgtgtggtgacagctgggaggatgacataaggagctccttgtggcacctcccagatgtctctgctcatcaaaccctgtgtgttcaaacctgaagttgtcatgttttctctctcaaaagcttttgctccatattcaggcaaatgtcaccacccagttgtccaagccagagtatgggcattaccctcaatgcttggctgctgtggacacttactcccattattccctgaattctgtcctttccacttccggtgcatctgcactgctgctcccttgccaccaggtcctcaatatcttactcctaataaaccagggcatcttgtctccctgcctccagtttgctccctcaactccatccttcaccattgcaaataagatgattgttggaacactttgatttgcttacaaggttctagcctgccagtatcttcttcattcgtttatttagccgccgtgaagtactctgtggcaggccctgtgacaggcactggaggtgcagaggtgaacgaggggtgctgccatcagtacccttacagcctgatgggcgaggcagccacaatagaaggcactgttaagccatgggaggaagctgtggtcagtgagtgctcagatgttggaggccatctctgcctggagaccagggaagtgagactgcatttggctattttttttttccctatgtatggttccttttctacacttaaaaaaaagatagcaggaattggtttgaaaaactatgaaaataatgtacatgttgtattggaaaaatgcagaaaacagctaaaatagaacctcaagacatcccataataccaacgtctatctagcctctattaaaattttgtgtcttccctaacaagttttcttcttctcatctatattttacaaaacataagatgcccttgagtatactattttgtacactactcattttacaaaccaatactctcgcatttaaaaaacagctcttttgttgtgtcttgttataaaaggaatacacagctatttcaaaaagtttcacaccataaaaactacacagaaaataaagattgccatctattcccatacctgaagatactgtctgctaatagctgtatgttattttacaattttaggttcattttcacagttatatataaatataagtgtagatggacttaaacttgctatttcctcttaatacatcatagcactctttttacttaaataccttttgatcacttgtgtttttttttaacagctatacgataggccatgtgcatatatcataaattatttgaactcatttttatggatattggggttgctactatagtatatatattcatgatttcaaatagcagaatgatgaaaaggcttctgtgggcatatatatgttctagtccacttaattctttgggatatagtcctacaagtgagattactatggcaaagattgtaaacattttaagttttggtctatatatgctgttggcagaattataagatgatctctgatgatctgtgtctttctttaatcccctccctttgggcatgggtggaacttgtgacttgcttctaacccatatgcattactctgttctcaccctgctataaagaaatacctgagactgggtaatttataaagaaaagaggttcgattgcctcactgttccacaggctgtacaggaagcatggcagcatcagtctggcttctgaggagatctcaggaaacttaaaattatggcggaattaaggggaagcatgcaaatcttacatggccagagcaggagaaagagaggttggaggaggtgctagacacttctaaacaatcaggtcttgtgagaactcactcactatgcagtaccaagggaagatgatgttaaaccattcatgagaactctgcctccatgatccagtcacctcccactgggtctgcttccaacattgggattacaagtaaacatgagatttgggcggggacacagatccaaaccatatcgccatagaatatggcaaaggcaatgggtgtcaatcctgtgaatatgtttcaatatatggtaaaagtgaggggattttgggataaaactaaggtttctaatcagatgactttaatcaacagagttaattttgagtggtcctgacctaatcaactgagacattttaaaagagtctggaagtcagagaccctctttcctgctagcctggaagaagcaagcctcaaaaagtctgcagctgcaaggaaatgaattttgccaataattatgtgcgcttggaagaagactcagcctaagatgagatctaagccctggctgacacctccattgcagctttgtgggaccttgagcggagaacccagttaagttctgcctggactcctgacccactaaaactgtgagaaaatgaatgtgtgttgttttaagccactaaatttatagttatttgttatgtagcagtagaaaacaaacacaatgtaggaaaattgcctttgataaattatacaccaatttacacttccaaccattatgagagctcccatttttgtgaatttttgtcaacacctgctgttgccaacctcttacatttttgctaatctaagaggttaaaatatacttgtttaatttgtggccctcaattagaagtaaggttgcacatttctcatatttgtatttttcgttttaaaaattcatttttggtatttgcttaatcatggcctttgcctatttttggcattttcttactgatttgtgagagttcttcacatatgtggaagccaggagagagtcagaaatatagatattaggttttctgttacaaacattgcaagtgtttttgtttcttccacgtgacaattttgtttttattttcaaacattgtttatggtatttggtgaggagggatatgagcgttttctcattctgttgggttttacaaagaccgccgtggtattccgtatggaagtgggaaggaaaggcatgagaaagcaattacattagttcagaggaacaaacgaagatgatacctgaactattaatacgttaggaactgcaaagatggagggatctgagccaggagatatttcagaagtagaattggcaaagttttggtattgtcaggactgatttttaccaggtgggacatggagacagagggatgaagtgagcagcacatattccttcctggatcagtaggcactaagtttaccaaggaagcttctccttgatagatctataccactggacactctgggccttgcaaatcccctgagaccaagaagtctgtatctcctctcttgtgatcacagccctgcctttattaccagtggatgaatgaataaattattgttggaggctcttcttctcttcctactaagggataaagactttactctttgttgtagtttatttgaagccccctcaccaggaagacctatggttttaaaaatgaacaagtaggcaggggtatttgctcaaagaaaaaattcacttggacaggcctggcacagtactgatttccctttaaacagcctgggcagccttgtctctaggcaggtgtgggggtgaggtgccaggagaagtgtttgtccttgcaacaagcaaactccagtgacatgttcaatgtcgcactgaaattcctggcaagaggagagaaggcagcctgctctgttcctaaactctggaagattctatctgaaatgaagaaatgctgcccacagcctgtaatggaataaatgaagatctgttaggtaggggctgcagcatgcttggggtctccagtcggtgggcttataggagagatgtcagactaacaaagctgaggtcctgcaagtatctctctggcaccacttagctcaggtgtggattattcaaaacttcactcatggtcccttgaataattcactgcagtagttcttaaccaggggccattttgctaccctctcaccagaggacatttgaccgtatctggacccatttctgcttgtcacaaccgggacagtactactggcatcttctgggtagaggccagggatgcttctaaacatcctacagtgcactgagcagttccacaagaaaagaattttctggcccaaaatgtcaatggtggtgaggctgagaaatcctggtttagtaggcacaagagggatggtgtgaattaatgatatgtctgagttagaggtgcatgcagtatctcccacgcactacaccaggttctttgaataatgacccccgtgcccaagattcttttctctttccctggggtctcatctgggtacagtttggcctctgcgatgctgaggacaggagtgacaacgcagccccaagtggtacgagcccctaggttcacccccagagttctgaccaacattacttgtcctgaaacaggagacatattaaaaagcaagtccatttgtgaagtacagcaagatctttccttgcagacctgagatctaacatttataaacattcatttctgtttgtcagggttcccacgtcatacaccaacccacagtaccactgacgtcagctttgattctggtgatccactcatttctcccagtttgaggctgaatttctgccagaggaggtcagctgcaggaggagacagaaagctggatttttgaaaatctgggagtggataaatatttgatatgtcttggcttgagctggacattctatacctgagagtcagaggaaactaattcagaatctcaattctagggacgctacccttctaaagcagtctggagaaaaggtggaaccaaataaattggcattaaatactgtgcacatctctcaggcaaaatctgatttccctattgtacatagaggtgtatgtatattatatacagatgttaagaatttttttaaaggttgattccagatggaacaagattatatttgattttattaatgtttattcattgatattggcaacattcttttctgtcccgagagaaagagaacgaaccttacaaagtgtaaatattggccctaaattgtcactcataaaggatattaatgcctgtagtctgtttcacgaaccaattttacagaaagagggttttttttcatgtcttgagtctgtttctcagaaatggtcgtggtgggacaggatctggattgacagcggcaaatgagatttgcatggaggcagcgtctccaaccaacagccctgcagaaagttcttagaactccttgttcttaatcccctttggcaggagttgccacctcttccacatgtctctcacttctttcccttcacgttggtctccggatactcctgctttggctgtcttgactgtttctattctagcttgttctctaggacagctccccacttcccttctcctccggtactctctggtactgcaatttcattaattcccaaggcctcaaccaagagactctacagataattctgaaatccctgtctccagcttcaacctctctctgaaccatagacctgctggccaatgagatggaaacatattgagaagcctaaactcgtctcctcccaatattttctcctacttaacaaaggggctatttacctatttattcaaggtttaaaaaatgcaaagtggtgtttgatctatctttatcccacagattaggaaacagttccaagatagcttaaaatgtgtcccttcctggtactggattctttgtgcaatcgggactgccattgtgagtgggagagttgctatatttgcagttgtcattatctctattgtcattattaatcttaatgtgattccaagcaacaacttcccactcttcgatgagagtttaaggttgtcagcaaatgtggaaatattgaggtcctcactttccaccaaatctggttttaacagattagataaatgagctcgccagctcagtctaaatggcaataagtaagctacatgacatcacagtcagaacctccatgcctgggtcagcacctaacacatctattaagaaggcaaagtcagacaaggtattagagagtgactgagagggcagacagggaaggtttcttcagggaggtgaaataggagtgggtgtctgagtggtgaacacagcttcccttcttaatatttcagagtagagtttcaagcctggaggctatcagaggctgggtgaccactagatgaagatgtgcggaggattttggcatccaatagcgatcacagagatgggttttgggggatcctgctcctccagtgattctgagattccatgatgattactgtgccggtgttgagaccaaagtcatgcaaaggctcatgaactagatgctacaattcggtttttgcctctgcctttctgtgcattcactaccctattacttagtcggaagattccccagctctttggtttgagtcattactggcttaatcgaccccatgatgttccaatggctgagtttttcatatgcttgaaacttaccatttcactacactggaaagggaagaaaagtttgggttattcccccatgtgactttcactgacaaaggatacagaagactcttgaaagctgcctctcctgtcagctaaatggagaggctgcctttcagatccttgatttaaagtggcagggactggataacatggttaggtggagtcctcagaggcctcatgatggaaaccaggaagcagaaactgacaggcagacaccccaaacttgagctttgtaaggtctacacaaatagtaaactccagggagtcggtcagcaccttcagaggggctagccttgtgttttctaagcatgacatacctccacgtctttttttctctaccttgttctgaaaaatgcttgatccatttaatgcctcccaagcttcactgtgtttagggaggaatgagaaacaaaaccccagctttaacagctccttatctctcagcctgaaatcatgagagtggggcctatggcccagtatcctgagtagcaggtcagggtgttcttgatgctttcattttgttcctgtgcatctttggtaatgtgttctgttcatctatgcaatgtaccttaaaggcaagaaactcctccagacagagaagcacaagtggaggttgcctatttatccagtcggcgcctggcctacatatttatcgtaatagaatctccagcaaagctgggtgcggtggctcatgcctgtaatcccagcactttgggaggctgaggcgggaggatcacgaggtcaggagatcgagaacatcctggctaacacggtgaaacccgtctcaaaaaaaaaaaaaaattagctgggtgtggttgtgggtgcctgtagtcccagctactcgggaggctgaggcaggagaatggcgtgaacccaggaggcagagcttgcagtgagctgagatcgtgccactgcactccagcctgggcaacagagtgagactccatgtcaaaaaaaaaaaaaaaaaaaaaaagaatctccagcaaactgaccatgaccataatgactctggtggccacagagactaagaacgaagtttgtgctatatcctccaccagtgctcggtctcttatatacattattctcatttaaatgctcaactggtttctgaagccatggtcattgtgcccattttactgtactgatgggaaaattgaggttcagcaagatgcagccagatcctgacttttgaagaagtgagcctcaggttaggggaacagtgagatccatagaacaatgcctgattcttgggcttgctttaatgctgcctctgtggccttgcctggcagtcttgatcactgcgtcaatgtattaccttgaaagtggtgatgtgttttttccaggaatgaggtggtagggcagtagggaagcaatcacctgctctacttccccccagtgcatggaacacatgtgtgtgcacatacccatttatgttccaggtcacataactgagtcaagattaaaccagaacttccatcttagtgagagtttctgtaacaggatcatgcaatatatcttattaaacatctactctgtttcaggccctctgtaagaggttcaagaagctatagatatcttaggattgctaaggagaagctgcagtttttcaggttgacattgtacctatcttcaaccttcatagaagtctttgtttttagacttagcttaaggcttctctttccctctctttttcttttggcattacacaatttttttttatcatgtagtcaaatttatcaatctttcccttaatatttctggattttgatttaaaaaagactttagatacttccaaagttatacaaaattattttctttctaaaattctatttttctgtattttcttctaaaatttcagtggattgggatttctttttgcatttaaaatcttgacccatttggatattatcttggtgtatatagcatgcagtacaatgcatttctggaaaagtccctctttggaatgccccattacacacacacacacacacacacacacacacacacacacacacacacacgctaaatctctgtaacatttagatctatttctgcactttttgatgtttcattagtcaaatggtctgtcaataagccaatcaattatcgaggttttaattattaatgtattgattattgaggttttataatatgtttttaagtgagcaggctttctcatagttttttctatctatttttgctacattattttcccaaaattccttagaatgaatgaaaagctctgttttccttcatctaattgacactgactccttctgaacactcaattaaacaatcttctcctctgaggatgcttccctgatgtcctcaggccttgttacattcccgaagcctggtttgttcccaaagtatcttgcatgcccctctgtcacctgttcatacagtgcaggcttgtgattggttacttttttatgtccccactaagctatggtctccttaaggtcagggacaaagtctgcttcaactgttgttaaagcagattgcacaatgcctggcacatagtaggtgcttgctccagttatctattgctgcatgctaagtcaccagaaccttagtggcataagacagtaatgtatttttcattatgtcttatttttttgatgaaccataactagctcaggtaggtggcttcatttgggggctccttcctgtggttgcataagacagtggctagagctggagttatatataagccagactcctcactcacaagtctggaggttaatgctggctgccacctgggggcctcaactggggctgttagctggaacacctatctctgacctcttcatgtggcttgggcttcctcccagcatagtggctgggctccaagagcaaaagcttttctctttcatgacttgttgtaacttttatgtttagcttcagaagtcacatagaagcctgttctccatactccattggtccagcccatcacaaaggtccacgcaggtcccagaggaggggacataaactccacctcctggtggggagtgacaagatcacattgtaagaacttgtgggataagtggcgtggtcatgaccatctttggaaaatataatctgccacagtgctcaatatgtatttgccagatatttgtaaatgcatgatttaagataaaaaagatggttatattctgggtttagacttgaactaggacttctggctgatcaaaacagatcaggagctggagtgagtgtgcatcctacccccagagcctagctgagtgtgaagtcgagttgcaaggctcctaggaaagttttctcatctcaggagcagtttcaggagctgaagggggatgtgtgcagccatgtcaataaagcattttgagttctttatcataaagttcccatctcccattcaaagtacaggttattagagtttgtttttccttctctactttctaaagtaagtgctttgaagaagatggatgcaggagaaatgacacattaagtatttctgctgaaatgtgggatttctgctcaaatggaagttgctgtgtttatgactggcacacaaattgaagaacggaacttgctttttgaacaattgagtttatcatttttgctctcagaggtacctcttgctaatggagaaagctaaaaaggtttgaaggagctgtcctctttgattctccagataaagataacttggcatatgtctgagaaatgcacaagattaaatgagagaactcccccacctccataaagaccctgttgagtgccaaccagtctgatgggcagtgaagtgcctagcaatgtgggtaggtaagagcttggagagtggggttcgctgctgcccatgtctcaatgacagcatttaattgatccagggcatgtttcttccctgtgggtgactcatttgtaggaagcactttactgaggcagcctttaatgaatgtgtcatttcctctaggacataggttctggatccaggtgttgtggactcaaatcctatttctgccttttactggctctttaccttggaccatataactttacgtcttggtgcctcagttgtgccatctcaataatggggacagtagtagggcctaccttcagaggttgctgtgaggacttaagtgtttagtgccgtgcccagcacacaataaacacttagttaggtattaattttactgttgctcttgtttctgttttaactgtctttattacccatgaactgctcttcccagacctctggacctgcaaaccatatatgtaatttaaaattttctagtagctatatttttaaaaataggaaccaggtgcaattaattctagtagtatattttatttgatctaatatatttcaaatattatttaaatgcataatcattaaaaacttattaatgatacattttacattctttttcttattctgaatttttttgtctttgaaatatggtgtgttccttatagcagagctcagtttgcaccagccacatttcatttttctggttggttgatttatttgctttttttttggggacagtttggctctgttgcccaggctgggtatagtggcacaaaacagtctcagctgactgcaaccttcacctcccaggttcaggtgattctcctgcctcagcctcctgagtagctgggattactggcgtgcaccaccacgcctggctaatttttgtatttttagtagagacggcatttcaccgtgttgaccagactggtcttaagctcctaacctcaagtgatccacccaccttagcctcccacagtgctgggattacaggcatgagccactgtgcccggctgtaccagccacatttcaattgtttaaaatagccccatatggttggtggccacagtataggacagcacagctctggagggcttgttcctataccaataattcagctgcagctgacaagatgcctactggggaaagggatgaactctatctactgtgagctgggtactttacaatcatataatttaatcatgaccatcatgacagcaggtattttgtgcccattttataaatggtttcttcagaaggcatctaatttgatggactagaagtaatttgcccaaagtcacccagctaaacagtggcagaatttgaactcaggtctgtgggactgagatttcttccccatggcaagatactagatgctcgtgataggcagtagatcataagcaccatccagagccgaggcagggctcacacagagccatctgcctactgtgccaagtacctcctgtgtgaccgcatttgaagatagccagctgggctcagtcacagccaaggtgagggctgagtctgggcccagggttagggctcaggataagtctggggcttggagctgtgtctgtgatctgggtcatgactcagcgtgagtctgagggtcgggttgcagtccgtggcccaagtcagggctcaggccgtgcaagggtcagagttgagtctgaccagggtcagggcttgctctgtggtgagacaaaagtttgatctgatgctgatgtcagggctctgccttgggtcaagatatgagtttatcttatgaccaaagggcagagtgcagctagttcataaagggctcatacctttcggtggattctggcagagccagaccccatgctgggcaatgtgtctgtaaatgctgggatgctgtccttcctctgccttgttgcagtagcaagtgacccagcccaccgtgggaaacaatgcaattgcatgtttgggacctcagttgcagtatgggctagagtttgtcatgagtgggaacttatctgaagaacactggggcacaaaatggttgctgactcctctgccatgtccaccctggatgaaacaaggattccagcagctgtactggatcttgcattggtgctgaaatgtggttgaggatggtgaggcagaagatgggatttccttggctctcaggcaaggtaggctaagcttacagggacccagccagtgtggctggaccatggggtccatcagggcattcagggagccaggactcacataccactcactcccaatgactgcgctgacttggtggcatgaccagcttggtgcatgaaggttctgtttgttagaccaagccaagtgccaggcagtgggccacaaaaggtcaccctgtctcgggttatatacatggggtatagccatccagcaaactattattcagctgtagaaatgaatgacaaaccattttcaaataaatcattaagagaaaagcaaggtgggaacaggatgtatagcatgctctctttgacataagaagatataggaataaaaatataaatgccaatgccaacggatgtacaagataccaataaaatgttattattaccttgaggttgtgtaggaggatgctctttatctggatcacatgttgaggtcgaagtccttctctgagtgtggcaaaaagtggaaaatgcaggctctggtggaggagtccccactttgggagctagatgagtcgtaacctactggaagctattttcttgtgatcccttccccacagcaggggtagaaatgtactttgtgaacctgaccataaactgcttgctgtcattagtttcaactgaaatcaaaatggttttgcaagaaacccaaagcagtgaaaaatgatggagctaaacatccttgtattgtagatatttcctttggggtgaaacaggcttgtgtgtgttattattgtggctgccaaagttctgaagcaaactgtttccaaaaagtattgtgcatttataatgcaatttggaggcgcttatgtttttatttgacaggtgcatatttcatgagaacaacattgaacgtgcctttaatcaggatttgtagggaatcgctggtaatccttttatgtttcttctttatatttctattttataaatttgattcactgaacacaccacaaaaattactaaacaactaaaaaggaccgacagtacaagtgagctgagtaagaataccagcaaatgctatatagtgtgtgattgtgttcatgtacatatgtttgtatgtatgtatacatatgtctattcatacatatatatatgtcaatatgttacagacatgttacatattgttacaataaactgtgttggagcacttgacaattaattgggaaaaaataattagaccctcacttctccatggagtaacccaatagatttctattattacataataatcacaaatataaaaactgaaatcataaagcaatctacaggtaaatttatataaaatcttgtacaggagatgattgatttcatagctcattgcctcagtttctttatatgattagataatgatagtgtctaccttataggattgctgtaggaatttaataaacaatgtatgtaaaatcctcagaaaagtgcctggcatgtgggaagtgctatacagtgttaactattatgactgtagctaaacatggtaccaaatagaggaactaaaataaaatgatagatgtaactacataaaatgctagaatttctgaatgtcaaaaaatagcatatacaaaatagagtgcaaatgacacattaaaaattcaacctagatgacagtaaaatattctatatgcatggagttatttcaagtcagtaagaaaaaagagacagacttctcagaggacacatgagtcaatagcctttcaataacaaaagaaaacatctatattaattcattctttctacaaatatttatcatgtatctcttatatcctagactctatctgggatgctgggatagcagtgagcaaatctaaacccctgctgtcaaggaacttactttgtagtggccaataagcacgtggaacaaggagttcagttcacacaggatcaagaaagttaagttaaaataaagggtaaccatttttttccatgtatccacgtagcaaatatttttgagtgactttatcctatattggtgatgatgcaaggaaattagcactcttacacatccctagcaggatgggtaagcaccagtgcagcctgtctgtagggaattttagccaatatgtgctaaaagattttgaaatgtgttattcctacacctccacaacttaactcataggaacttattttgaggaataattagaaatgaatagagagatttctatccaagaacgtgtgctaattaattcattcattcatttacaaatatttattgatcagtcctacacccaggacactgttttaggtcctgggaatacagcaatgataaaagcagacaacgtttctgtttgcggagaattcgtactaaagaatgtgcatttatttgtggggaggagaggaggtctaaatagacaataaacatataaatattaatattgtgaaagtggtatgaagaaaaataaagcatgataaggagagagaggtgttccctggctctccagagggctgaggtggaagaaaaggactcctgttttaggtaagatatcagagaagacctctctgattgactgaaatgtatgcaaaggcctgcatgaagccagggaccatgccgtgctgacatctgggggaggattatcctcacagaggggaaaggaagtgcaaatgccgtgaggtgggaggaccatgtttggtatgttcagggaggaacagggaggccagtggggctggagcaggttcagccatgggaaggccaaagatgagatcaaagagaatagtgggagatcacgtagagatttatgggccattgtgaggattgtggcagcattgagaagactggttgatgcttaaaacaacagccattttatttaatatctcatgattttgtggtcaggaatgtggacagagctcagctgggagattgttccactccatgtagcatcagaagacaggtctcttggtgatattcagctggagaataagttaatatgcagagttcaagatggtttcactcacattgacaccttggcagggatggctggagggctgggctcagccagatcagttaactggcgtgcctgcatatgcactctccaccatggtggtctctagaattgactcaaatctagaattggctggaagacatagtgggagaaataaacttagcagccacatttagtctaccacatggagtaagagagaaagaaaggagtcaaaggggcctagtttatttcaatgtgatttaaaattgtgacaacatagaaataaccaaaatatccaactgagaaaatggctaaatatattatataggtttacattcacataatagaatagatttacatttacataatagaatatttgtgaatgtaaatctgtgtaataagccatttgagaatatcgatgaatgagagaagataatgcatgatatgcctctgtgtgtgtccatgtatgtgtgtgtgtgggggagtgcatgtttgtatttgtgtacccatgaacatagtttttactctttttaaaagctgtaggcactggaaggtcagtgttcagccatgacagtggaaggtcagtgttcagccatgacaaggcccaatgtcatgggccctctgtcatcatcctctgtccgtagtgatccccagacacttttgcatggctgtttagacagaattttcctgcagctcttttgggagtagctcttgaaagtttaacccctgacagttaatgaagaacagtgaggcttaggaggcaggtaggcctttgagcaaataactctgagcaactggttgccattgtcagttctcctaccaagtatgcgtttgatttttaaaaggattccccaaagttctatttaggactacagagtctctaagaatgtatttctgttgtcaaggtcaggagcaagatcatctctgtggacctgtcggtttgaaggagttgcaagatattctcatcattcattgatttatatactcaaaaaacatatatttgcatgtgccaggaaaaggtaaggaaagggagccttcatgtgccagcccctgtgctgagccctggagctgtagagatgagtgaggtggattttttgtctgtaaagagtttgccgatgggaccaagtctgtcatctctctttcctggcctgaccgaggacaagcacttcttagtaaccctgtgaatacctggatgaacgaaatgaacgaatcagtaggagaaccatttggggattaatttggggctcaaatctgtagctcaaatttggattgggaaaaggaagcctgaaatgttccataggtttctctataggtccagttttttgggcgagctctgagaagatcagagttaatttcttccagttcctgcagcttctcttgaccagagcatgcctgactctacaaaacaaaccactaaagggtgatcacagataaccacagttgccagagtttggggagtctctgtgcaaattttgaaaaggtaacctctttttgtgaacagattgcaaaaagatgtccctccctctgaactggctcaacccacgtgagggatagtggcccctaggctaatttaatttcaggcggactcacccccttgacctgtggttttgtgcacaactataggtggcagcccaggtggcttggatttttccagttcgttggtgacctgctgtgatcctgtctctgtccatctgaattctggacagtgtgttccagcctgtgattccacctctagcctcagagcttcgtctggccaaccctgagtttgaggttcattctcttctccccaggggcctccaccccaggccttgcctttgggaccagccctccacaccaagcctgcaggagctccttcacaccccaggaaagggagcctgcagacaagaccaagacaggtgcttccctcctctcttctctccacagaacagaccagattcagatccatctactgggacccaggagggaaagagggctgcgctgacactctccccacaaagccaccattattataatcatcacagcacttagcaagtaacctggagtgctggtttcactggggtgaacaagccagtcaaagccagcattccagccccttttttgttccaagtgccgatttgtttccctgtgctgttgtgcattcatttcagttattcctttagaccagaatttaagttgcttattgatttggcctgtcaattgcccagtaatgctttaggcaggagcccagataagaaagaattccactgcatcttgcagcaccctcccccttcaacctctgagttatttctacctacaattgcgatgttttaaacatctttgcttttaaatattactttccttttcctacttaaaggcaatgcaattttctcttcccaagaactcctttcatagtctcattccatgttttatttccttctctatgcaaactcatttgtcaaaattacacattcagctccttctgtggaagacttagggatggagtaatgtttaaaaaaatgactttgtgacttagaaaaatttcctctcctgtgagtttaagccttttttttttttttttatgcagccaccaattagagagatagtgcaattcaatagatattcattgagcacctgccatgtgtcagctgcttactaggtttggatgcaccaataaacaaaagaaacaaatcgtttccgtcatggtgcttacattttcatgtgggagacagaaaataaccaattagcataataaatgagtagagttcatggtatgctaaaaggtagtaagagaaaacgcagcagagagaatgcagattggaaattcttgcagtagaagtggttaataattttaaagagtaggcctcattgaggaagtgatatattgacaaagacttgaaagagatgagagagatttagtcgcgtggatcatgaagggtggaggaagaagggaggagggaagactttctagtatacggccagccattgcaaaggccctgaggcaggagcatgcttgtaatgttcaaagaacagcaaggaagctagggggcctagagctgagtgtgtgaaggagaaaatgggaggagagtaagtcaggaatgtacctggagacaagaacttgcaagactcggcacaagacagggatgccctctctcaccactcctattcaacatagtgttggaagttctggccagggcaatcaggcaggagaaggaaataaagggtattcaattaggaaaagaggaagtcaaattgtccctgtttgcagatgacatgattgtatatctagaaaaccccatcgtctcagcccaaaatctcctttagttgataagcaacttcagcaaagtctcaggatacaaaatcaatgggcaaaaatcccaagcattcttatacatcaataacagacaaacagagagccaaatcatgagtgaattcccattcacaattgcttcaaagagaataaaatacctaggaatccaacttacaaaggatgtgaaggacctcttcaaggagaactacaaaccactgctcaatgaaataaaagaggatacaaacaaatggaagaacattccatgctcatggataggaagaatcaatatcgtgaaaatggccatactgcccaaggtaatttacagattcaatgccatccccatcaagctaccaatgactttcctcacagaattggaaaaaactactttaaagttcatatggaaccaaaaaagagcccgcatcaccaagtcaatcctaagccaaaagaacaaagctggaggcatcacgctacctgacttcaaactatactacaaggctacagtaaccaaaacagcatggtactggtaccaaaacagagatatagaccaatggaacagaacagagacctcagcaataatgccatatatctacaactatctgatctttgacaaacctgagaaaaacaagcaatggggaaaggattccctatttaatagatggtgctgggaaaactggctagccatatgtagaaagctgaaactggatcccttccttacacctaatagaaaaattaattcaagatggattaaagacttacatgttagacctaaagccataaaaaccctaggagaaaacctaggcattaccattcaggacataggcatgggcaaggacttcatgactaaaacaccaaaagcaacggcaacaaaagccaaaattgagaaatgggatctaattaaactaaagagcttctgcatagcaaaagaaactaccatcagagtgaacaggcaacctacagaatgggagaaaatttttgtaatctactcatctgacaaaaggctaatatcgagaatttacaatgaactcaaatttacaagaaaaaacaaacaaccccatcaacaagtgggcaaacgatatgaacagacacttcttaaaagaagacatttttgcagccaaaagacatgaaaaaaatgctcatcatcactggccatcagagaaatgcaaatcaaaacctcaatgagataccatctcacaccagttagaatggccatcattaaaaagtcaggaaacaacaggtgctggagaggatgtggagaaataggaacactttttcactgttggtgggactgtaaactagttcaaccattgtggaagacagtgtggtgattcctcagggatctagaactggaaataccatttgacccagccatgccattactgggtatttacccaaaggattataaatcatgctgctataaagacacatgcacacgcatgtttattgcagcactattcacaatagcaaagacttggaaccaacccaaatgtccaacaatgatagactggattaagaaaatgtggcccatatacaccatggaatactatgcagtcataaaaaatgatgagttcatgtcctttgtagggacatggatgaagctggaaaccatcattctcagcaaactctcacaaggacaaaaaaccaaacaccgcatattctcactcataggtgggaattgatcaatgagaacacatggacacaggaaggggaacatcacacaccagggcctgttgtggggtggggggaggggggagggatagcattaaaagatatacctaatgttaaatgacgagttaatgggtgcagcacaccaacatggcacatgtatacatatgtaacaaacgtgcacattgtgcacatgtaccctaaaacttaaagtataataaaaaccgacccccccccaaaaaaaaaaaacttgcaagactcaaaggccattgtaagggcttaggctttggctctgcatgaaatgggaagctgttgcagggttctgaacagagagtaagatgagttgcttgcataagaagaagatcactccagctacagagctgagaatagactgtaggaggcgattgcagatccgagatagggcagatggtgacatctgcaaagggagagctggttgaaatggtttgattctggatatattttaagatccagccaacagatttgctggtggattggtagtggaagtgagaaaaagagaggagtctaggcctgggcaactggaaggatgagattgctgccaagtgagatggggaagaatgtcgatggagcaggtttattggggaagatcagcagttcagtttcaaacatgttaagtttgaaacatttgctggctatctattagacaacatgagacagtggaaaggctttggagttaaacaggccttcattgcaatcacatctgcaccatgattagttctgtgaccctcagaaaaatacttactgtctctgagcctcagcttttatactcttaacatggagataattttctccatttaccctgcactgggagattgagatgaggattaaataatagagtgtgtcctggaagcaaaaggagtgaatccctggttagtgtgcttccagaaaggccagggatcaatcctaatctcaactcgtagactctcctggttgactcgaggtaactccttttcccactctgggcctgttttcccatccctaaaacaagagagttgacacaatcaaccattcagtttgtcttggcattaaggttgcatgagtgtgaggatctcagggtcagatgggctctgccttccagtttgctagcgtcccacctcctaatgggaattcacacacatgtgggtatgcctacacacacacacacacacacacacacacacacacacacacacacacagcctcgctcaggtctgaaggtttttctcttgtttggttagactgggtatgcctgtacacacacacacacacacacacacacacacagccttgctcaggtctgaaggtttttctcttgtttggttagactgcttctccctgagcatgccagtgcctgcatctggccagaccatttttaatttgagacacacacatctccgtgctgttgatctccttcctccctggccggtagtctgggtagccctgaccctctgtggtggccgaactagatggagaaagcagtctaggcagtcaccgttagcccagtttaaccacaatcactgccaagggaatactcccccgacctctttgaagcagtttcattaagagaggagctaaacatccccagtctgcagtatcatcttatttactctgttgcatccaggtcaggagagaaacaacaggtttcactccttccagtgttctcaaacctgcatgcctgggtctccgtctgtgtccccttagcccctcccttggaagagcctgcagcacagcctggtggtcctttcatgctggcttctgcgatgtatccctcccaccaggtttgctcatccgccttgtgcagaggtgtggccaaaactggcacctgcatggccattttgggggagtgaatctttttaatgctagttgatttccttgcaaaccatattatgcttctgtgatccaattttgtaaagagcctgatgtttctttactgttctgttatagcgattgttgacattaacctgacctatctacttttatttttaactgcctctatatactcttccttggtaatggcctgttttcttttcagcttgttaagtctacttgtttctaaaatactgcttgacctgaactttcttgtgtactttattgtcatttttactctccctcattttactccctgacattgtccctgaccattcatttatgatagcatttgccacactgtatcaaaatggactgtcttcctcatctgacggtaaggcaagaattgggtaccagccatctctgtggatgaagcagctagttgaggggcagaaaccccttgggagctcaggggacacttgtagaatgaataaataagtgaagaaattaataaatgaataatcatactaaagaaaagatgattgagaatttacttatgcttttacccaggaaaatgtgtaaacgtattagttcctttgtgtctttctaaaccttagtccaccttataatacacagaagattctgaaagccaggttctttttctgacacagataactcctgggtcagaaaactccagacttgcaagttccagagaactctggggcagaaagccatcccaaccagggcaggcaaagccccagggaactcaagccacagcattttctggcctctggggaaggatggccaattggatattctctgagcttcatcctcctattgtgagagagagttaattgattgactcaccgatgcatcccgtcagtcagcagctgtttacggaacaccagctgcaggccaggcaccgtgctgcaaggcgtagatatgttgctgaacacgactcccttccagatgttcaggatttaacaggcaagtaaacagagggtccagagaaggcactcagcactgcctcatgacatcagggaggattgctcagaggaagtgatgcctaaactgagatgagtcaaaatgaggagagggaagggtggaattgttaatggagagaaagtgcgcccctgccagattatctagggacaaaggcccaggagggagaactcatgcagatgctccaacaggcacttaccccagctggatcgtagtgtaatggatagaggggtaaacaagagctgatttcctagcggtcctgagtctcgacaggttgccacgtcaggagtattgatctttttctggaagcgatggtgaacctctgaagagttttaagcagagaggtgacaggatcagaactgcattttatatgctcactctggctgctgggtagaggagacaaaagtgaaagcagaatggaggaggcaggcggggagggagctgctggggtcatctaggcaacagaagattgtggctggactagtgtggcgagggtgtgggcgctggagaaaagtgggcaggttcaggagatctttagaaggtaacatcgacaggccttggcaatctgttacatcaggggttggcaagcagttttctatgcatcaaatgtggcccactgcctagtgttgtaagttttctcggaacattcacgctacaacggtagagttgagtagagtgaatgttccaataaacagagcctgcaaagcctaaaatgtttactgtctggtcctttacagaaaatatttgtctgcccctgggttaggtgcaaagcactgtgggaagtgaggttacagaaagatttgaggttgccacctagattgtggaggttggtgcgtgttgctgagatggaaacccaggaagtggagaaggggataacccagtctttgcagccatgcctcagcctgccattctaccggtttttaactgagccctgccactttgcctggctggctcttcacagccttctcctctgggaaaatggcccctcttcttccttctctgtccagctgtagctctgctaacacttgacggtccttccaaaaccttgaccttgctttcaccgggccacaggatcacttgctgccccccatcaccttgaccaagggacgggtctcttggctgggacccaccttcctgcgtctttctatgtgtgtgttacccccatctgggactccagaaccggatgcagtcattttatcagctttgcaccagtcggtcctttttccctgtgtattagaccattctcacgctactataaacatactaccagagacagggtaatttataaagaaaagaggtttaattgactcacagttctgcatggctggggaggcctcaggaaacttacaatcatggcagaagatgaaggggaatcaaggcacgtcttacatgatggcatgatggcaggatggcaggagagagagagaacaaacgaggagctgccaaacacttataaacccatcagatctcttgagaactcactatcatgagaacagcaagggggaaactgcccccattatgcaatcaccttccaacaggtccctccctcgacatgtggggattaccattcgagatgagatttgagtggggacacagagccaaaccatatcacctttcttcgcccaacccctacccccaccccagctttgttgctgaagccctagaagcctttctgtccacccgagcctgctccagtgggctgagtagcacctgggctgccactgccctttgttcttcctctccctccctccatcccctggagcaatggtaacttgcagggacattgggtgcactgtctcttttggaggccaggaaacaatccctgctgtctctttctaagcaggtcacctttggtgggtgtgtaaatccacttttctgcttgccaaagtgacattttcatgatacccaaagttattaagtggcatctttggacactttctttttaaccaaagtggagtaggctgggaaatgtcaatagtgataatgtacagttacgtctccaatacccttttgattgaacacatgattgaaatagtgcaaactgcagagccctttgcagggaattgccagttaaagaatttgttcagactcacgggtttttgactgtaaactctgagtgttttaaataaaatactggctgccatggccctccaaccggaaatgtcaaatgctctgcctggctctgcaacccacataggcaggctcaatgcttctccaacttgggagcccaaactgccctcagtcagaagcatagaaagagtctatcttgctgggtgcggtggctcacgcctgtaatcccagcactttgggaggccgaggtggtggatcacgaggtcagtagttcaagaccagcctggccaagatggtgaaaccccgtctctactaaaaatacaaaaaattaaccgggcgtggtggcacgggcctgtaatcccagctactccagaggctgaggcagagaagtgcttaaacctggaggggcggagcatgcagtgagctgagattgcgccactgcactccagcctgggtgacagagtgagactccatctcaaaaaaaaaaaaaaaaagaaagaaagaaagggtccgtcttgccattttgagaccactgtgctgataacggggttgtatcatcccccacataggagaacctgctctgataagtgtggacagaagtttgaatggaaggaaggagggaaagtagggaggcaagcaggatctggtgaaatcagaacttagatcatggggtagtcacccagtcagtgtccttcaattcaaacttgggctacaggctacaatttctcccagtctgagaccaacagatgccagcttattctcaccacaacactgtctaatgccccctctttattgccaaggacaatccctctctggagctcaacagcttgtgtccttccagaaaagctcctatctatggaggaagggtatcttatccagaccatcatgggcagggagttggaggttgggtgggtggggggtggactcatgccactgtggaaggcccctagtggccagggtgcttgccttgcccagtgcaggctgggcttgtgcagccaggggcattcctttgaccttcctgctggcccctccttggctagatgcaccttgtttctcttacttccatcttcctgtgggcaccctgctcactgtacctcctacaccttgttgcccaattcctacaacattaattagttgttaattaattcattctgtaatttgacaaatatttgttgagctaaggtgctggacattgggaataggatggcaaacaaaacagacatgggtcctgctcttatggagcttatattttaatggagacatatatgccaaaaaaaaaaaaggctatcaattgtgtttagatgttaaaaaaaaaaaaaaacaaaaacttatctctagtgttagaggtcaaggtaggcattgccttaggggacttagtaactggaagaggtatgggtgagcttctgggatgcccgagaaggcagagaatgttttattgctccaggtggtgtttacacaggtgtgttcagtttgtgaaagttcatagagattgtgctatgtgcaagttcctggatagataccaaactttgattaaaagctaaacaactaattaaaaagttaattaattgtaatcatgatgagtgctatgaaggagaagaatacagtatgggaatgcatgagaagtggaccttgcctgagaggtgaagggggctttcctgagaaaggtgcattttatatgggctcgaaaggacaagggagagatgttggggccaacaagaatgtgaggagagcattccaggcatgtgccagggccctggagtaaatgagagcatggcctgtgggtggaagctgggggaagacccatgtggccacagcagagaaggtaaggggtgagggttcttggtgggtggtgaggccagagggtggccagcagaggccagggcagggatagttttctttatgcaaagagtaatgggaaaacaatgaaggatgtgctatggtctgaacgtttgtgtccaccccaaagttcatatcttgaaacttaaaccccatggtgatggtattaagaggtgggacctttaggaagcaattatgtcaggaggatcccacccccatgaacgggattagtgcccatgtaaaagaggtttgagggagcccccggcctcttctgccctgtgagcatgcataaagtcaccatctatgaggaacagaccctcgccagacatcatatattctggagtctcagtcttggacttcccagtccccagaactgtgagcaatgaatttctgttgctaataaattaccctgtctatggtatgtggttataacagctcaaacgaatacaggagagcaccaggctctaactcaggtgttaatgagattctcctggctgatatgtgggacacaagctgtggctgccaagaggcgaagtgggaagaccagtgaaggggctggggcattctttccaggggaggtgagggcatggcttggacaagggtgtgggaaactaagatggaaagaagtgaatgactgccccggggcagtgggggttggggtcctcttcctggatcatctaccaaagttgcccctcagccttcttggatagcagtttggcaacatctagtcaagagctctcaaaacagtcacatcctctgatccagtaattccacttctagagatctgttgtaatagaaatctgaactacgtgaacagtttcattcacaagggcacttggattagttttctcttgctgctgtagcaaattaccacaaacgtagtggtttgaaatcatacaaatttattatcttacaattctggagatcagaagtctgaaatgcatcctactgggctaaaattgatgtgttggcaggatgcattctgtagtatctagaggcgaatccatttccttgccttttccagcttctggaagctgtacgcattccttggctcatggcctcttcctcgagcaatgcagcatcttcaactctcttcctcttctctatccttctttcctatttagaaaaatgcagacagaaacaaataagtgtacatgattcaactaccaagtacaataaataggaattattatttccctgtcatcttatttgttcatcattgttcatgctttttacacttgttatgcaaagcgtaatacttttgaaatttgcccagctttctaccaaatattacagcatcagcatgggccatgttctaagagttctttataagcattttaatggcagcacatgcaatgtgtggggagagattatttaaccattttcttctgtggggggcttaggttgttgcagtgctgaacattagggtgggcagaataacccacccccacccccgataaaaaatgtctatgtccgtgttctaatccccagaatctgtgaatatgttgccttacactgcaaaaaaggactttatagattaagttaattaagttaattaaagcaattaagttaaagatcttgtgatgggaagattagcttggattattcaggtgggcccaatgtatcacaagggtctttataaatgaaaaatagagtcaggaggaagaggggaaatcttctctctcctcttcctgtctctttttttccctctccctctcatatttagttgtaggcagaaaagtttagaaaccaatgagataggtgaccaattcaggtaccaagagatataaagatgacaaataatgtgaatttccttggaaaatctttggctacattttctggagacatctaaatgtaggagtaaatggcttattaattatgagcctctcaccttggtaattaagcaataaagacccatcaggcagtgcatttgtgggcgattagatctgtgtttggtggagtcagaaacttgcagctgaagattaagtggttttcactacctgagagatgcattaatcacctggagctcccctggctggtggatttggttgctgatttggaatggcatttacacattaaagtgaggaatatccttatgtgccgaggagagctctggagtgaagggtagttactcagcagggacacggcgggtttccaggtgtgacatcctgactcagtacagcatctgtccaagggtcacctttgtgctactgtcaaggaggtacagatgggagagatgccccagacactgacgacacacactggcgacacacactggctgtcctgccaggtataaggactggatgtccttccaaaggacagagggagccatgtggggtagcagaagcctgtctgctttagagacagacctaaatttatatactagcttcattctttctataaaatgttgggcaagttacttaaaccttctggtcttcagtgtcttcttctgtaacatagacttagtagtttgcaatagtcagctattgctatgtaaggaaccgagcacaaaatatcagtgacatacaacatgaatacacaaataaataaatgaacatttatttagctcataaatgtggctaaatgatgataaacgtcttcttgggggaacttttgagaccttgaacacaagtcatgctaactgagggccaagtgatcttgtgtgaaagaatcaggctaagagccctctgcctctttctgcctggagcatagcatggctctggtgcagagagctctgaatggaacccattctcatttggcatctaggagttctgcctccctgggtgctctcagaaagtgcatggactggtgagggtgaggctggtggagaggagcaggcaggagtgagtttatagacagggtgcagactcaggcatttggctgatattcacgtgatagcaacaatcattagttgattcattacaggccttccagagattctgtggctccccaaattttgtatgacttttatcatttcatgcctttattcaacaattatttattatgcagctactgcgtgcaggactctgtgatgtacactttagatacgaagaagaataaggcaggactgtccctgccctcaaatggcttgcagtctattgggaaaggagacattgagcatctaatttcatagtgaagtatttactcacagtaacttttgactaacatttctgagcctattttatcatctttgaaattggaatcatagtagtctcctcctagggttgtaagggttgggtgagctatgctgtgtaaaatacttagagcagtactggcatggcatgaaagttgaaattatatatatatatatatatatatatatatatttttttttttttttttttttttttttttttttttgagatggagtcttgctctgtcgcccaggctggagtgcagtggcacgatctcggctcactgcaacctccacctcccgggttcaagcgattcttctgctcagcttcccaagtagctgggactacagacatctgctatcactcctggggagtttttgtattttttaatagagacagggttttgccatattggccaggctggtcttgaactcctgacctcgtgatccacccacctcagcctctcaaagttctgggattacaggcatgagccaccgtgcctagccgaaataattcttattcccagatgaatccaggacagttgaagcatcctgggtttagcagctcagacagctctctgtaggccaggagggtcacctctgaccccaagtcccagcttcaacaactggacttcagtttatggaagtttgtttgagttctggcattcagcttttatttgagagccaacccagaggggcatggaagaaattgaatttatttttatgacagttcttagcacagcctggcgatcaatcatatgtcaagatgctgttttgaaaagaagcaggttataggtggacttcggagacctagctccacttacgaagtgagcagtggtaaacacatcacttgttctctctgctcctcaattttctcacctgtaaagtggaggataataataccaacgttggagtatttcactactgggattcagtgaaataataggagtgaaagcccccaacacatgtttgcctggcagccagtaggcattcaagaaacgcaaactcagccgggcgcggtggctcacgcctgtaatcccagcactttgggaggcagaggcaggtagatcacaaggtcaggagttcaaaaccagcttgcccaagatggtgaaacactgtctttactaaaaatacaaaaattagccgggcatggtggtgggtgcatgtaatcccagctactcgggagcctgaggcagggaattgcttgaacccaggaggcggcggttgcagtgagccaagatcgtgtcactgcactccagcctgggtgacagagcaagactccgtctccaaaaaaaaaaaaagcaaaaaaaagcaaacccacacctataatgtctttggtctttgggtgttcaacagatggcattgaattgactatttaagccattttgcctcatcaatactaattaagacagtcagaatcatgagaccaagtgccatgtatcaatgcatacactccaggccaccaggaaaatatatcacaattataaaacaggtctgttgttcaataaatactttgcaactgattaatcatcccctacatctgtgcagtgcttcagagttaatgaagcagttttattctggttggtatagtgaatgttcacaacaaataggtgaggctggcattaactcattggacaaatatttctgaacaccatgaggaatgttgtagctgtgaagcagacaaggcttctgactcaaggaagacttcaatgtggcttgggaaataggcagttctatgagttacttctcttgggtgtgatcgaggaagaaagtgtacagtacctcaccccctggtaatcacaggaagcttcttaatggagataatgtcaaagccaagtcttaaaatgtgactaggagctttacaggtgaagagaagtgcatttgttagggtaggcgtggctgcagtaataaatagacccaaaggcacaatggctcaatacagctattttaaaaatcgttttttttctctctctctctctctcttttatttttttttgtttgagatggagtttcactcttgttgcccaggctggaagtacattggcaccatcttggttcactgcagcctccacctcctgggttcaagtgattctcctgcctcagcctcttgagtagctgggattacaggcacctgccaccatgcccggctaattttttgtatttttagtggagatggggtttcaccatattggccaggctggtctcgaactcctgacatcaggtgatccacctgcctcggcctcccaaagtgctggggttacaggtgtgagccaccacaccctgcctaaaaattattcttaataaacatttacttttggaataaatttagattcatggaaaagttacgaagataatatagagagtccccatctactctttattcagttttaccaaatagtaacaacttacattgccatggcacatttgtgggttactgttaacaccagattttgttgaggtttaatcagttgtgtttttttcctacttacatgctttttctgttccaggatgcaatcaaagatacctcattgcattcagtgtggtatgttggattggcaacaggagcaatagtcctttacttggtcactcggtcacctaggtggacagcagccctgacttacatcctcagtgcatggcttccaagtttgtcctgctcatttccaccccagcaagctgaaagagagaatgtgcctggaggaacacctgcaaggcactttagggcagggcctgggagtcacagccatcacttctgttcccatttcattggtgaaaactagtcttgaggttctgaatcttctgctcagttttgctgtgaacctaaagctcctcttaaaaacgttaaagtcagctggctgcggtgcctgtaatcccagaactttgggtggccaaggcaagaggatcacttgagcccaggagttcaggaccagcctgagcaacaaagggagaacccgtgtctatgaaaaatacaaaaattagctgggcatggtgctgcacacacgtaatcccagctacttgggaggctgaggtggtaggatcacttcagcccgagaggttgaggttgcagtgagccatgattgtaccacagacctccagcctgggtgacagagtgagactctgtctcaaaagagaaaataaataaataaaattgaatctatttttttttaattatactttaagttttagggtacatgtgcacaatgtaaaaaagccttgtcttgaagccacacatagccaacatagggtaggaaatatactctctagctgagtagctgcttcctagctacagccctgtgtgatggaaggtgagagtgaatttgggagagagcaagtcgtctctgccataaggaggatgtaggagtgtatatgaagcagagaaaattgcattaataaaagcagggaggaagggcaagtggtaatattgccctttggaaggcaggaaggttacaggacccagctgggactgcacagctgttaagcagtgctgcaggagctcaaaccccactccctgccccggctcccacaccaatgcgctcatccccttgatccaaaggccttcagacccacaggctgatctgcaggagaagccatagagatgtgtttaatctcataaatttctttaatggcatttttatcagaagttttacaactgtttaatttaaaagttaggcttttccccaaattcgttcattctacctgaaaagagcaagtggtgagagagcttacgagatcctctaagggccctcattgatttgcttttcccaccaggctctgggctgcatctgtgcccagaggctcagtcacagctgggcatgagaaaaacgtgtgtgcatcagaggcagtgtgtctgcctgtcatctcctgtgtgatgctggtgtctgtttatttctggccggatggaatataattgctccctgggctgacagtgacaaatggtggtgtggggagtattcctctgagtggtgggatgcacttgtgcacctaggcggacagaagcaggccctgtcacacagcaacgtggggtttgcttctcagtttgaggcctcccaggcatggagaaagttccaggtgggtgggctgtgagctgccttggggactagtgtctgtgtcttttgagatgtgaagggcagccagggatatttcaggcccccttcttctcgggtgctgtcttcatgtcccagctctaacacgaaggacccggggcgccagaacaccagggcactaattgcagcttgatttacagtggaggactgtctgattcctctgcaaagccatcagaatggaaatacggttgaccctcagtatcctcaggagattggttccggcaccctccttggatactaaaattcttggatgctcaagttcttcatataaaatgaggtcgtatttgcatgtaatttatacacatcctcctgtatactttaaatcatctctaggttacttacaacacccagtgcaatacaaatgctatgtaaatagttgttttactgtatttctttatttgtattattattatttttattttgctttaagttctgagatacatgtgcagaacgtgcaggtttgttacatagatatacatgtgccatggtggtttcctgcacccatcaacccgtcatctaggttttaagcccttcatgcattaggtatttgtcttaatgccttaatgctctcccttcccttgtccccccaacaacctcctgacaggccccagtgtgtgatgttaccctccctgtgtccatgtgttctcattgttcaacccccacttatgagtgaaaacatgcggtgtttggttttctgttcctgtgttagtttgctggtattttactgttgtattgttatttctaattgttttttcttcaaatattttcagtccatgattggttgaatctgcagatgcagaacctgcaaatatggaaggctggcaatagctgtattgggcttttctgctcttattctaaaagtagcccacatcttttgggaaaagtctgggcaatgtggaagagtgaaaggagaaagcaaagttgatcccaaatatttctagccagacctaatcatgttagaattttgctgtttctttctgtgaaggagactaggcggttgctgggtatacagcaaggctacacctctcagcccctttgcagttaggggttaccctgtggttatgttttagtggtatttgggaagaaatgagtcacctccagccctggccctgtaaacaccccacccccactgtttcttccctcttctgatggtgagatacagagggtccagagggggacttcaagactctttgggacagtggagccaccgatagaaggagcctgggcttttcaatgacaaagtgaagcagagccaccctgcagattcatttttgactgtgacacgagcgaaaaagaaatctttcttgtgttaaatctttgaggttactgaggttcacttaccctgaatagaacaccttccaaacacttgccgtgggcatgtgtgtgcacacacgcacatgcacaataatggaatcatatcttgacttattttttgcaacctacttcagtctctcaaaaaggatatgaacagctctccatgataaagacatatttatccaatcaccttaatggctgcatataattccattatatgtatgtaccctactttacttcatgattttcctatttctgggcatttgggttgtttcaggttttaaatttttatgcacttctgttatgaacaggctggtacatatctttgtgtatatatacaaccatttccttgggacatcttcctagaaattgaattacttggccacatttatatggtgtttgatcatcataggaatatcttcttggaaaagaggtattgatttataattctaccaagagcatatgagaggtctaatttcccaaaaccatcaattgtctgaaaactaatctgattagtaaaaaataatagcttgttttaatgtgttattctttgttgattgattatgttgagcaactttttcttgcttattggacctttatattaccagttgctacttctttatgcatttttttctttggggagctttacacatctcttattattttgcaagagccctttgcgtattaaggataatatgtgtttttcgacacattagtagtaaagaataaactaaataaatttatttagtttttaacagatttgtcttctttatactctttttatatagagatgtttttaatttttatttcagtctttcttccttgcttttaaccttattacacttttaggcaaccaaagcaagaatatgaaaagatacttcagattttcttctagcacttttattgttttgttttgttttgccttcgagtttttaatctttctagaatatatttctgtataaaggggatgtaatcatctgactttaatttattctgaaggccaggaagatagaaggagaataaggcatattcaaagcactagaagctgaggatggctggcctgtagccctggaggagatgtttagccctgagcctggagggattgtcagggctgagtgatgagggtgatggactccatgtagaacctgctgagcctcaggtgcctctgggcatcaaaatgtgctgatgaggaacttaagtgtggaatgaattttggtgcttaaatccctggtactggaccatggaataaacgcaggagaaatgaatgcatatttctataaacattcccacataagaatgttggtaatagctttatttgtaatagtctccaaatgaaaacaacccaaatgacatccaaagtagaatggatacattgttgtattgtactgctacagtggaatactatttatcaacagaaagggactggctatctgtacactccataatgtgaattaacctcaaaacttatatgttgaacaaacaaagctggacgcaaacagtatatactgtaggattccatatatatgacattcacaaacaggcaaaactactcatgttgatgaactccaaaacagtggttccctatgggggtgtggcattacctaggttagggaacaagataattctggagggctggaaatgtattctctatattgggttggatgacaggtatgtgaatgtatagaaattcattaggctgtacacttaagatttgtttattttactgaatgcaaattacagctcagaagaaaatagtgggaaaggattaaaatattcaacattagtttacagacgaagcaactgaaacccagaaggtgaggtgactggctctgagttaatgttttagaccaaggctgcctgatttcaacgctggagccaggggagaataaaactgtgatttcctccatcaccaatcggatggaggtacagctagctctaggttccatccctgagagggttttggggggaacaacagccagtatgagggttacagtcaatgaggcagcagtcccaacagaaatctagcacaaatgtggaaactgaggcagaaactccattttatagttttatgctcttcagcggtgcgtgtcagtgtgaactggcagcacctgcttactgggggccaggaacagagttctcctgatccctcactcctttagcacatctagcttggcaaaggcaagcagcatgaccaagtgtggagatcagcattctaagcccacaccctgactccatgaaaaaccagacctggcaagaaccaaacagcagtacacacagttccataactggagaagccatgccaggatctaaatataatctaggagaactttaaacacagcttcacagggacacacctatgggatcatttatgccagttttttccttaagatgtccccaaggcttgcatggggcactgatagtgacagcagagcagtgtcattggtattaaatatgcatcaatgacacttgcaatccagaaacaactcagacccaacacacctccctgctgccttctagagtcccggcccagcctctgcccttggcctcagccctatgcagggacttaggaaaatgggcaatgattgcaggtttgtgctttcctcttgagtttgtggaaggaggctagtaccttctcatggtagcctctaaggaaactggcacagacgtttactgaatcaagagcagttcatctctaaggttatatttccaagggagaaaaagcaattgttacagtccttaaatgtagcaaaggcagacctcatttagaggtgattgctgcatcctagggaccagcagcttttgctgccagacacaagttaaccacagggcgctggtgccaattcagaggcctcctagaccttctgttccccaggaggaagtagcccacagacaggaagagtcattataaaaagaggctgggggtggagagtggagggagcagtgtccctgtgtattctgcttccactgaggaggaatccaggaaagagagagtttcactaaagcccctgggattctagcagcacctagaagtgtttccttccagtggccacattgtgcttgaagcctcctgggtggggtgtgctttatgcgggagccctagtcactgccctcagaaggcttgcagtctgctaaaggacacagcacctccaattacatacaaagagaatccatattgaggaccacatatactagtattcacttaccttggggtcccagctacttgcagagagcattgtgaatgggttagcagtgggaattaaatgaaagggccgtctatagagatgtaccctgaggcaattttgctccctatgagaaattggcaatattcccccagaggacatttttggtcacattttggtcacaacctggcgagtgtgctactggcacacagtgagtagatgccaggaatgctttgaaatatccaacaacacacaagacaagatgaccctccatcacaaacagttgtttggcctcaaataccaatagaactgaggttgagaaatgctgctgtaggagaatgtagccactgtacaaaccatggaaaagcagggagagaatcactgcccaacctcgccatcctcctattctccaatcccatgcctgtacctcctattggctgaatataaccagaagttcgaaaccaagagcccattgaggcaacctgtagaagtcggcttccagaacatcagtcattgatacccttagaggttgagcgaaccagactcaacccagagttcccagtgagcctggtcctcctcagacaacaggatgggtgctcagcaaccctgtgttgttcttttttcatctgtgcttctgccgatgctcttttaatgtttgctgtcaaaatgagggcaggccatggaagtgggagatttctctgggttcagggaagagaaaatgtgcaggatgctgaaagagagctcggtaatgctgctgaaatatggattttcatacagttcaaaaacttctcacctcccacccggcttggatgagaacgtaagaattaaggagctgcaacatttttctagcacaatgaactttaaaaatggaattgctgtgcaaagcaatgactgatatttcagcaaacaggctaagtacaattgcattatggttatttcagctttgacatttctttgcatttagaatagcatcagcagagatgtttggagaccaagttgttcttccttctcagagcccagcttcttcaagtcaggggtcaaagagcatcaatggaagagactataatgtcatgccgtgccctgtagactctagattaatcattccattctcttgctggtcacttactgtccctcctttaatagtaatggcatgcctttagacatcgtgaggcagaaacttggaatgtattagaaatctatcaaatgaacttcttggaaaacaaaagtatggcatagagacaagaaaacaggtttgctgctcacctagtgggtgccaggactctactagctgctttgcgtaagttacatatgttgctaagacgagaagcttcccccatctagccttgcttccctgtaactatggtctctggggccacaaaaagaaaggcgatgaagagaaattccagggtggtttgcagattttcaggtgaatggtataacttggaatccttgtatacatcacagatcaggcagcatggaattaaacattaaatcctgctcaaagggcagaattttgcagaaatttatatagatttaagcctctacaatgttctattccatcagcataatcacccatagttcataataagcactaaggatattattaggactgtggaaagaccgtgcaggaacatctggcctttggcctcattttggggtgtttgtcctcatggagttcacccagaaaactcacacagccttgatggggaccatccagtcgacacatgaaagcttccatcttggtcacagtgtgtccaactccttcacatggagaattctgttcagagtcttagggatgttgatccccaagctggcgtgaatcccaaggatcctatttctggccagctagctttgcatcagccacaagctggcatggagcaacactttaaggtaaatgcacgtggctgtattgtcggtggttacatcagtgcaatattcgtcagaagagtaactctaagccggtactgatgggaatcggaaaatccatgagggtgagttgggtttgagattagtagagttgggtttgagatacccctctgtgccgtgtgagtccattttcttctttatgggtttgtcaagatcagcagtgactgggctaataatacacactcccaccaacagtatatgagattactttttgtggcaattcctcaaagacctaaaaacagaaataccattagacccagcagccccattacgattatactcaaaggaatataaatcattgtattataaacacacatacatgtgtatgttcattgcagcactattcacgatagcaaaaacatggaatcaacctaaatgcccaacaatggtagactggataaagaaaacatggtacatgtaccatacaaaagaatgagatcatgtctttttcagggacgtggatggagctgaaggccattaaacttagaaaactaacgctggaagacaaaaccaaatactgtgtgttgtcacttataagtgggaggtaaatgatgagaacacatggacacatagaggggaacaacacacactggggcctttcagagggtggaaggtgggagaagggagatgatcaggaaaaatatctaaagggtactaggtttaatacctgagtgatgaacaccaggggtctctacaacaaacccccatgacacaagtttatctatataacaaacctgtacttatacccctgaatgtaaaagtttaaaacaaacaccaacagtgacaatactaactacctttcagttaaacaagtaattcattcatttaactgaaagaatatttctatttgtaattgcccaatgggttggccatgggaaaggtctcctgggtcaggggaatggctgttccagccttcctgagaatttcaacattggagctgggctattgggcttatccaggtaaaggaagcaaaggtgaggtacacatttccagtttttctctacataggaaactcaaccattttcttcgtatgtctatttttgcttgatagtttgtttttgtttttacaattttatacaagcaaaagttgctactccacaatgactttctgtccccttgctattgattgtctggatccatttgctcttctactcacctggaaacattaaaaaaatggtgagaagggctaatagtttgacctctggtagcagagttgtctgggctgggctgcccaagggtgtcatgaaaggtggggttatgagtcagttttacttgtattagcagagggatggagattctaggggaattctacctgcccatgacctgtctctggctctgagacctcctgtgatctgggggactactgtgttagttgcagaggccctttttgcagagcaaggggtaggagcagagtagccattctgtacatttagagtgaaacagtggtaagggtttggaggtattcacggagcagactgtctggttgctattgctgtattcctagggtctagaataataactgatatataatgagtacttaatatacatttaaataagtgaatgaaggaatcaatgaatgagttgtggggtgagcccgcaaaacaagcctttgaggtcattgcttaaggcaatacagcctttccatggaagagctgaacttccaaccctaaccatcctgcctctgccacactgggttgccttctgtatgtataggatgttagtctttcccagtagcgaaaagtgtctggcaaagcaaaagtgcaggggagagagacacgcatccctctcactgttattcccttagacatttggctggtggtggtctcagaccctggtgcggagtagctctttctgattgaaggcacatcatgatatgcagcttcctcatgaacattgaatctggctctccctgggcaccagcaatgtcactcagttgaggatgaattgactaagcaataatgttcattgaacttctttaaactaacaacattgtgcaatgtgtttcgtggccaacagccatcattctgcatcctcatagaaagtcacaaagaggacagggctcataccatgcacaggttctggagtgagaaaaatctttgattctaatctgctcttctaagttgtgagaacttctgagagttacttcatgtctctgagctttaatttcttcatctatctattatagatagggatatatatatatatagggatagcgaattgatgctcaaatactcaagtatataaaaattcaagtgatgcagtgatattcttggtttcaggaaggtggggtttccaccgccaatatccacttacttcatgattttaaggaagtcgcttagctcccagcctgagtgttctcatttgtaaatatgagatgttgatattcaccatcctgccctgtctcacaagctaattgcagggttctagtgagatgtaaaagatgagaaggagatggaagaattcagctgcagactcagtcacacttctcttcagttgcaggagagggccatgtgcctcaagtaacttaaggatggaggctgtacatacaattggccaggatgggaaaatattgctgaccctgtgggttttgtgatctgagctaggcaagtccctgcctgaggagatagtgtgaacaaacgcagagagaaagattttcaatagagtctttgtcgcttaatagatgtgtgccttgagagagttacatcacttctctgggcctcagttttatcatcttatctctttccagtcttggcataaatgtcacctcttagaaaggcttttttatattaatcggctttatggtggtaacagaaaaatcctatcattggcttacatgacaaacttgttttttccttgctcacgtccctcctaggtgtgggcttgctggaggcatggctctcgccacatgttttctcattccacaagcaggtgggaggaccagcccttgtctaggacatttcattttcatggtagacgatagacataagagattgagctaagtgacacaggtacattcctttagatgttctgtacagcaatacctgctcatattccatttgtcaaaacaagtcatatggcaaacctcctgtctctggggcaaggaggtctcctcagccagcggggaaggactataagttacgtggcggtgtccgggatgccgggatgcatagtcatcttggagtggaagaaataatggatattgaacaataacacatcctagcacaacttccctgacttccctattgggagttgcagttgcttgctagcaacacctaaactgcctgccgtgattgctgctttatttttctctcgtactcatcatgttctattatcgttctgtatggtttacttatttagtttttaaattttctatctgcacctggccgccctagactgtcagctccatgagggcagggatttttatcagtatttctatgactgtatcctcagaccctgggaaagtagcatgaatactttgagttgattaattaaacaatcttttacatgaagataaacaatggatgatgtaccaagtgcctctctgagcattaaatccttccttccaggcccagagcattctgtacccattagatttccatctgtccccaggagtgtagcagcaatgctctgaattattctgaaggtcacattggagagctggactgtctgtcacctcccacaatctgatctgctgacaagaattcacctgtctctgtagatgaaatactaggataagcaattgggacaggcagctcctactccataacacaatactttcctgaaaaattgcataaaagtcaaatgtctgtgttggaacggttgacttagcttttctttttgtggtagggagtgaggaggtttgcttcaagaaatctaaaaaataataactccccaacttgcctcaccttttacataaaatcttcaaagctctgtttccaacattcaatatatctttaattttgttcttttcattgacacttgagcacaaatttgaccagcttaagtccaataagcatccaattgaaactaaaaatgtaccacttccaatgatgcttaatgatttccatcattgcctcgggtttatgggcctgcacttatcatcaaaaatgcgagtggttccataatttcacttcagttttcagtttttacagaacaataatgactgacaacatgagaaagattttaaatatttattcatcccagcatatttcctgagtacccactaagaggctgttactcttgtaggcaattgggacctgtgctgagcagtgaggacagcctccctgccctcacagagtctgcaagccctttggggatataattgtgtcaatgacattgtgcaaagagatgatgcagccagcatttagctagtggtgggcaaaatttgttatcctgtgatagctctattttaaaaaatccattaatgcacgaagcttaagttttacagaatttttttttaagaatttcagtaggtttgggggtacaagtgctttttggatacacaaagacatacagattagtattatagacattggagtaaaaatattttaaggatgcccctgaatggcatacaagagggagaattgctcagttgaagaaacaaaattcaaggactctctgtaggcaattacggactcttttctcttctcccaagaacgttttttttggtctgaaaatcctgcaaagattatattgccttagatataggtgctctaggatcaaggaacacccaggccttttccttttaccactttctgcggccttggtgacattttctactctgctgtccctgccagaaactttgacatcatcttagatgctaccattcattcaccaaacggttgctcagacccatcagctccaccttagaaatgtcttctgcatccacagttttcccctccatcctgctactgctgcttggtagaaaaaactaagctccatcctggaatactgcaacagcctcctgcttcaggtctcaacccagtcctggctgccccgtgactggataaactctaatctggacatttcaccctcttctctgggttacagaggaaaactgagtgagaacaaaaataaaaaggtgtgtgtaaaagtcacggtgtgggagagaaagtgaaagtgtgggggagagaggtcaagtaaaagtatgtgtaagaaagaaaatgaaagtgcaagagagagaatgtaaaactattaactgtgagaatgaagtaaacatggatataagagagaaggtaaaagtcagtgacagagaaaaagaaaaagtgttgggggaaaggagaaaggaagacagcatgcatgagaggaaaagcaaaaatggcttagagaaaagaaaaatggtcagtaagaaggaaagtaaatgtgagtggaagggggagatagaaggtaaaaatgagagagagtgaaaatgggctgagagaaagtaaatgcatatgtgggagaaagaaaggaaaaatgtgtggagaagaaagactggtgtgtgtttggcacagaatggcacatagtgaggaagaagaaataaatttaaagaactcttttgggaagagattttgtttgagctagcctatcattgaattttatgctacttccaattttccattattataccatttcagagagcattgttgtacatgcgtcattgcaagttcacatgattctttcaggtaaattcctagaagtagagttgccaagtgaaaacttattcacattttgaaattttagatgtagaatagagatatagactaaaaagggccaggctgacctccaaaattgactgtaccgctactcaaggcggttcttattgcccttgcctgccagtacctgagactatttttcattttaatgaataaaaacatcatatatcaaaaatcttattgttttaattttcatttctttgatacccaaagtggaactgttgttcacgcttcctggctacttgtatttcttcttttctaaactacgaatttacttcccttgtacatttttctttggggatactcattagttttctcattgatttgtaagaacagtttatgtattaacagcattaatcttggttggttctatgcatggcaaatattttccaatttagacatgtgcctttgaatgtgttgatggcctaggatcatgagaaaatatgatcctttatgtgattaaatgtatttatttttaatggttttggtttcgatgtattgtaaaaacattttcgtgcaaaaaattttatattcatctaaattgtggtgtcatttttgtttgcttttgtgctacactgagagctttatttcatctagcatttattttgggataagattggatatttttcacacacttaacccattatggcaagactattgaataatgtaacattgttctgctgcattgatcgatctttagattctgaatttttatttatgtttgtgtttgcttctggatgttttgctctgtgcttcatatgtgtcttcagtggcatctgccatctctcttcccaattcaggttaaggaggtattgtttgcctatatctgattcccagggtatctgaaattgctcaggaagctggtttgaaagttattcctttcatgtattccttcatctggtctcatcttcatcatgagtccagcaacaaaccttgaggcttttatgctgttgtaggtttccctatatttattcccttaatagtttctgtgaggaacacagcacctgttgaaaagaattctctagaggttagaaaagaatgatgcacagcaaagttggtgttatagactgatggtaacataagagaagcatccccttcatgtataggtggtaatgaaagtttgagatcagtcagattatccaggaattgctaaatagtagaaagggattaagaatgactggaaccctagggaaaacaaacaagcaaggaatggggaaggtccaggaaaacaaagtactcaaggatgtgggtatagtagtcataccaatgtttatctgggaaaacctaggtaggtgaagggttccagaaggcagggctagtcagccagacccccattcaacaagtaaggccacaggttttctcagagagttcaaggggcagaccgtaagtcaacaagctagaaattgccaatgcataatttgaacttagagattcaaacttctttctatcacagatgtagacacgaacactaaaagctaagcttattacaccagataagcattgactaacacattttgcatagagggaaaatgcacttagtcaaacaaacaaaaaaaatctctgtttagccatccatttcaaatttttatagaaaatagtgtaggcagcatcaattatgcttgggcaaatttagactaattaatgggttgactaagataattattgaaatttgtctatggatgaaaagaggaaagatgaaccatttaaattgctttttgtgtgtgcctgatgactatttctaaaagaatgagcccacggggaagtgtatgaaatgggagtggcccagctctttgcagggtatgatgatagagtaacaaggcagatgttttaatcaatacaccaggattaatgccttaaaacgtctaatatgcataaatccataaaacataccccttatataaagagatatataatttgttgagggtcaacaatgtgcaagaattcttccagatgttttatgtgtttgattacctttcatctatgaaaaacaatgcatgaagaagctatcattaccccaatttatacaccaggcccctgaagcatagagaggttaagtacattacccagttatacacacagtaaggggagaatcgagtccaattccgatgaccacattctgtgccctgtatcttttcaaagaagcctcctttggtggcaatttacttgtggtaatgaggaggccatggctcaaatcagacttagacacactgagaaatgctttcaaaaccaagtgtatgatagatacatagtgcatcatgcttatttcctttcagtgttttctggaagggctttcagttttattccacagatgtaatctgggttttctctttttttccacaggtgtaatcttgagcaatttctaaaacttagatctacctataaaggatgcagcttagccccgcaatgcaataaatgtctgtgccaggagccaaagtggttcctttgtaccagtcggaatttgtgtctaggcaagagataccatgggttaatagggggtaacttggctttggatcaagaatgcaactaggtctgctattcactggttgtgtgttttgaggtgggatatctattctattggattcaactgatagaaactcaactaaaaaaaaaccctaatccaaagaataatttcatggttcatataatttaaaagctcaggggtggcatttgccttatgcctatcttcatttcctccctctctccctctctcccctttcccttcccactcacatcactgcttttctctttgttattttcatttgctagtgagtcccttcaagaaattggaacggtggtctggagatacttctagtctttaatggcaggctctcactgtccttcctgaagtcacatacgtacccctatggcaagaaagttggggaggtgattggcaacctatcaggataacatggaggagagtgacaattcacaaaagcaaggggcgtacagaagacaaagcgatagctattcaatacagagtggtcattctataaatggctctcgtgatttttcaattgcaaattagcccacagtcttcctaaaaattacaaaatctcgagccattcacagttcatgcccattttcaatttgaaacaaacagtctggtctttgtctaagcacttttggcaaagttttgaagtatttattccattaatttttgagatagaaataaatcaaagtagatatctgccctggagattttcttgacccactaccacgattttccacagtagtgttgagatgccctaggtgtgtctgatcaatgggaaataaggcagtgttgtcgcagctggctactagagactgtgcatcacataaaccacaaccttcccctcccattcaccagctgtggcgagggtttgccactgaggggcatgtgtttacacatggctctaagcagatgaataaacaggtgcctcttcacatggatagttctccaagatttatttcatggaggtgagatgaacctgacttttctgttgatctctagtgcaggtagttgagttaatgatgggccacagtttatagcattcaatcacattggtacacaaagcactcctgcttgtttcttttattgagtaaccctcttatctccttcttctctgctcccgtgtccctccccaaccccactgcccacttaatacatttaatttacactgctttgtttgtgttcaggaaaaatttactttgttaatctgagtattttaaacgtacacggataaatcatttatcactcattctacttcaccctttttttttcaatcagtactatttttttaacttccatccagattactgtatgtacatttcacacattacttctaagctttgcatcatagtctacacttttgttatccattaccccgtaatcggtgagcagactgtctccaaatcaccgctactgcctatgatgttctgatacactttcacccagagggccctgtgagaagttctctggactataaattggagttgaatgtctgggtttacattagattagttggactaagtataacagattgttttgcaaaatgcctgcactagtccatgctcccgagctgcaggtgagtttctagagctccccagctctgccctggagtagcactacctagctttcttatttctctgccaacctattcagtgtaaatgactgtacattgtgttcatcttcatttctctgataactaatgagttggagcatcagtccaatgctccttaatattttgccttccctcttctttattgactgttcacataacacctgcgcgtttcttggagaaagggttcctgtgttttctattaaattttcacgagttgcatttatatcctggatattatttggttgtcgatttaagacatcacaagtatcttttcccaatctgtgttctgcttattttactgaatatacatccataatttttagataataaaattcctcagtgctttgatttatgatgtgtgtctttcaagtcttaagtcctccacccttaagtcacaagtatagtcttctatattttctcttaataactttatagtttcagtttttatgttttgttatttgatccatttgaaatctatctttgcatgttttatttttttccatagggtgatccagtatttccaacatatctacaaatctgtccatcacttttttattgatgtgcaatttaacatttattacatgatatatttttatattttcattggcctttctcagagctcattattcaattccactattactgtgccttttgttctgtttcagtattggattgggcaagtcaccatccttcatcttagctagtcatggattgttattctttcttataaattttaagctaagtttatctagttcttataggagtccaattagaatttttacaagattgcattgagtttgtaaattaatttaataataatatagcacatttgttatatcattgtatcctatccaagatcatagaatgcctggatttgttgagttttttcatgtccattaccttatcagattttttaaaaagttgtcttcatataggtcttaggagttcttgattgttgattcttaaacatattatagtttttgttatcatagtatatggtatcttttttaactgtgttttttagttacttattgatggtgtagaaaaatgctattgattttctggagttgatattatatctagctacctagtaaaacttattgattctaatagtttgttgactgtgtggcattctctgtatatatgattgtattatctgcaaataatgacaattatatgtcttcctttctaatatttacacctcattctgatccttttctctttctttgataagcagaacctgggatatagggacctttgtgttttctttaatattaaagggaatatttctacagtttctcaaaaatgtatactatttactataggttttaggtataacctttaacaagttaagaatgttatcttttattcttagtttgctgaaagatttaatcaaaagtagaggttgaactttatcagtcttttatctgtcaattaatgatgtgatttttattctaagactcgacttgcttttctattaataaaaatatttcctcatttgaaaataatgcatctattcccttctgtgactataaagtctctaaataatatatttttttttcattttacagtgtttctatcacatatacatatagaaagtttatgtcactcagactaattaaggaaagagataacttacaaggatatagaaaataattttagtatttcttggtgtccatgttagcaagtttccacttttctgaacttttcacttactgtagagcttcttaggtagcatttttacaagatttttgctaatgtaacatgtaattttctaaataagtgttagagttctgaggctcaaaattcaaaacacacaaaagcgtacacaggcatacctcattttattgtactttgctttattgagctttatagatattgtatgtttttacaaattgaaggtttgtggcaaccctgaatcaagcaagtctataaggcactattttttttaacagcatgtgctaactttatgtctctgtgttacgtttcagtaattctcttaatatttcaaacgttttcattactattagatctatgacagtgatatgtaataagtgatctttgatgttgtaattgtttggggatgcacaaacgttgcctttctagcaatgagcaaacatagtgggtaaatgttgtatgtgttctgactgtccactgaccatccattctcctgtcattctccctctcctgggcccccatattccccgaaacaaaaaaatattgaaattaggccaattaattaccctacgatggcttctaagtgttcaagtgaaaggaagagtcacaggtctctcactttaaatccaaagctagacgtgattaagcttagtgaggaaggcatgctgaaagccaagacagacaggcaccaagctggacctcttacacaaagcagttagttaagttggaaacactgttaaaggaaattaaatatggcctgagaaggactccgtatttctttctctttctttcttgttttttttttctttttttgtctgttgtttgttagaattgaaaacctaactagtagtatgcagctgtaacaatagctaagtcttggccaatcccagtggccgtacttcaaccaatcatacactgctgagtgttcaaactgtgttcaaataatgcatacgccaagctgtaaccaatccagccattctgtacctcaccttcaatttctgtacattatttccccccttttttgtgtataaatcttcttccaccacgtggctgcgctggagtctctgtgaatctgctgtaattctggggtttgcccgatttgtgaatcgttcattgctcaattaaacacctttaaatttaatttggctgaagattttcttttatcagtgcaaatggaaagttcttgaagaaaattaaaagtgctactataatgagcacacaaatacaccaggaatgtttacctatgtatacatgtatttgtatgtattgaaagagatataagaaatattatgtataactatttatagatatagatatttaaactaatatagaaaaaaacacatatacatataaatgtctatctgagatataaacaatatctaaaacaggaaatgaagacacacacttagaaacatacagatgcatttaatttctcctaacttgttgctattcttgtggaccttgttgctaacttctgtgagtgaagatggcctaacagcctatgggagtctttcattgccagctccatgtgacctgccctagggtcaaacccagaatagagatttaaccagacccagcccaagtgccttcaaccaattgtgagagtgctgaccacttctcaaaagattttcaatcaagattggttctcttttattaaacatgtgatgtggatataaatcattgtgtttcagtttgagtaggaagagaagactctttctgggtaggggagtaaagcctaggtttgtttcctcaggataggctggggaattgaaagtgtgggttgagcaaaatggtacctgggaaaaaaagaatctcgccatagtgggtgtgcattgagtgcaaaaagtggcttttggtggcaggcaaatggccgtttgtgtggagggctgcacacactgctgtcagctggctctggctgcttctagctggacttgcagaatcctactagggtggtttgatgaacccctggattaaaaactcctgtttgccaggtaactgagaattgtttcacacatataagaagcatgggaaaaggtgtgtggcttgaccggtactacggaattccaaggtaaaagtccagcagagtttactttgccagcacaggtggatagataagggtatgaccttaacggggcctggtctgaggatccaggcaggtctgaagtggcagaagttaaatgtgcatgggcaagccaggaaggaaaacagagccctgaggcacttggcttggtgtctggccgtatgttccttcacagcactgctagttttctgcccaggccttggatctaaaggcgaagctggggagtgtacagccatagaagacccatgtctgggtcagacacagtggctcacaccagtagcctagcactttggcaggttgaggcaggaggatcactagagctcagaagttcgagaccagcctgggcaacataatgagaccttgtctctcttaagaataaaaatgtttttaaataaaaaaagaagacccatgtctgttattcttaaaagctcaggaatgtatagcttacacaagacttgaatgcaagaccatgtgatcttacttgcttactaggcttttggtgcctgcattctcacataaacagccaggctactctctgtgctctctcctgagagaggagtggaaagtctcccaagtgctgagacaataaatgtcccctctacccaaagtctggcatacagtgggttttcttacatatctgtgatatgctccagacaacaggagtgaaacagtcatattgctgatacatagagagtttgagtggtctagacagaagatcaaaccagccgcagcattcccttaagccaaagcctaatccaaagcaaggtcctaactctcttcaattccataaaggctgagagaggtgaggaagtagcagaagaaaattttagagccagcagagcttggctcatcaggtttaaggaaataagttttcttcataacagaagtgtaaggtgaagcagccaatgcttatgcagaagctgtagcaagttattcagcatgtgtagctaagataattgatgaaggtggctagactaaacagatgatttttagtgtagacaaaagtcttaagttggaagaagatgccatctaggactttcgtagctagagagaaacaaatgtctggcttcaaagcctcaatggacagacttgctctctagtgagggggtaatgcaactggtgactcttgagttgaagactgtgcttatttaccattccaaaaatcctgggactcttaaacactacgctaaatctaccctgcctgtgctctgtaaatggaacaacaaagcctggatgacagcacatttgtttacagcagggtttactgaagattttaagcccactattgagaccaactcctcagaaataaaagatttatttctaaatattactgcccatggacaatgtacatggtaattcaagagctctaatggagatgtacaaaaagattaacgttgttttcatgcctgctaacacaatatccattctacagaccatggatcaagaagtcattttgacttttgggtcttgtttaagaaatacattttgtaaggctacagctgccatagatattgattcctctgatggatatgggcaaaataaatgggaaaccttcaggaaaggattcgccattctagatgccattaaggatattcatgattcatgagaatgtcaagatattaataataacaggagtgtgggagaagttgattctaaccctcacagatgacttcgaggggttcaagacttcaatggaagaagtcgttccacatgtggtggaaatagcaaaataaatagaattagatatgaagcctgaagatatagctgaattgatgcaatctcatgataaaattttaacaaatgaggaattgcttcttatggacaagcaaagaaagtggtttcttgagatggaatcttttattgatgaagatgctgtaaacactggtaaaatgacaacaaaggatttagaaaattatataaagttacttgataaagtagtggcatggtttaagaggattgattctaattttgaaagaagttctacatttgggtaaaaggctgtcaatcaaagagcatctcatgctgcagagtaatcttctgtgaaaggaagagtccattgataccgcaaacttcactgttgttttatttttaaaaactgccacagccactccaacattcagcaaccagcacgctgatcagtcagcagccatcaacatcgagacaagaccctccaccaacaaaaagattacaacttgctgaaggctcagatgatccttagcatttttcagcaacaaagtatttttcagtaagtaatgttcatgtattttagacataattctgttgaacacttaatagactatagtgtacacataacttttatagacctcttgttcagtaccttcttttagtcactgctcaatatatcttggaagtcacttgattacataaagagctttttaaaatggctatgatttcatgatatgaatgaaacttggtggatttaacagtcccctgctaatagatatataagtagtttgcagtcatttgttcttataaacattatttcatgcatgtgtgagtatattagtaggaaaaattcttagaagtagaattctttgtcctaaggtaattgcagatgtaatttccatagatttgttcaattatcttctctacatagattgtgtcacgtctcagctcttacagaattacataacagtgcttgtttcctctacatcctcacaacaaagtatacatttttaacttgtcctgtctaaaatgtgaaaaattgtatctcagtaaaatttcattttatgtgtctggaatttgaccatcttttcaaatgtttatgagtcatttgtattttttttccccctggaaactatctcctgtgccagtttttctgttggcttattaataaataaggtttgttttttattgactgatttgtagtacttctttctatattaggaaaactatgagttatgcttttttcagtttaaagtttttgacatagtatattaattagtctgttcttatgctgctaataaagacctacccaagactgggtaatttataaaggaaagaggcttaatttacttacagttccacatggcttgggagacctcacaatcatggcagaggaagagcaaagacacaacttaccttgtggcaggcaagagagcatgtgcaggggaactgcccctttataaaaccatcagatcttgtgagacttattcacaattacgagaacagcatgggaaaaacctacccccatgattcaattttttcccatcaggtccgtcccatgacacatggggattatgggagctataattcaagaggagatttgggtggggacacagccaaaccgtatcacttagttttacagtaattttagccacacagatttttttaaaattttaattttaaatttaaaattttttaaaattttaaaattttaattcaatatatgttatccatctttccttttatgggttttgtatcacactgggcttccttctctccaagtgtataaataaatagtagcctctcttgttatttttataggttcatcttttccattaaacttttgattatttgctccatctaaagtttacctttgtgtgagctatagttccagctgcattttttttcctatatggctactcagctttatttactagtattagtatttactagtaaatacttatttactatttactagtacactagtactagatactagtgtatctcttttcctactgatttatattccacctttattatatcctaaatccatgctgtaattttgtctacttctaagttttgactgtattcctttgtctactagcatactggaattatacagttttatttactgaaatgtaaagtatgcttgaatatcatagatagctaatctacccccaacacccaccttcaccccatgtaatgctcatcattttcagttgtctaatattgttggttgttcatttttcacataaaatttagaattatcttgttggtgtttttattggcatcacattaaattggaattaacctatggggtgttgacatcacattgtatatttttttatatttttaaaaatctatccaagttctatgtgcgcatagtttaaatcatcaaattgttctttggcatatgataggagcaagtgtagactccaacttctctcacccagttgcaaacacttttcacctggttataattatgcaaaacatatttctgaattagctacctttattggtacttgtgacttttccactgtaccattatctattaatggttttgctttccctgtactccccacccatcactcatacaggcatcccttccacctaccttccccatcctcccgataaagttatatcctaattttggctagatcaacattcaatgtttacactattttgactatgtaaatgctattcaaaactgaaccatgcagtaaattatgattattttcccttcctgcacaactattatgttttccctgaagctaatatttgacttgtttatggtttgtttgcttcatttttatgtttttattactaattcagccccaacactttgccaattatctaaagctctactcaagatattcagatgcttcagttattttttcaatttcatcctcctacagaaagctctcccagagctgctggcttgctctgtgctggtgttgtgctctctctgtgccgtcctctgggatcttcctccactttcactctaccttcaagaagggtattatgctttactcctgctgtattcctgctcctattgccaataactccatcctcacttcttttttttctttttttcctgccttgtcttggaggtgcactttctttagtagcttcctaagaaagtgttcacagcaggtcagcatgtgaagaccttccgtcattgactctcacactcagggaagaatttgactggaaataactttcctttactactttgaaggtgctgttctattacatcccagcatccagtgtgacttttgagaaagctaaagccattctgattcctaagtatgaatttttcccaattccctgtccaaacttgtatgacatgatcagtgtctcatcattataaaattgctccattatctaccttaatgtggattaatttttatccatttatttggttgagcacatggtgggctgtttcactctggaaatactcattcttcacatctagggaattttgttgacctgttttgttggttattctctcccttcattttctctgctttctttttctggaactttagtatttggatgttggaactgttggattggttctgtaatacccacacttttgttattgtccaaatcttcggatgttttgctctgcctttcaagagatttcctcagcttcatcctctaacccttttattggcttctaatatatagtgtcctatttttaatttccaagagctttttattgttttctgaatgttccttggtttctaatattttgttcacagttttgcaatatggtctgttatctctctggggatgttagtaatagtttgtttttttttttaaatgcatgtgggttttttttttagttgtcaacaagtccctccaaattgctttgttctgcttgtttgttttgatctctatctttcatgtttgatgctttctccaggtatctgtgtctgatgagaaatgtgaaacctagactaagacaagtctagtggggagagggcagattagatcacaattaaggacattgataaattgatcatttatttaagcaatgagagatcaagaaagtgatggtttcccattcaagtactaaccaggcccaaccctgcgattaccacaaaaaaaaaaaaaaaaagtgatggtgatcctccacttttgtaattcaccaagatcagaaacacatggtaggagcaacagggttattttcacataattccctggtgattcaatctgcatatttcctaagtctataccctcaagcctaggaaccacagttagtgtgtactcagccccacgcctagtctggagatacagagtcaactattcagcaactactgagtcttactgaataccaagatctgtacttaggctctgaagatccagtattaagaacaacatgatccctgactctgaggtcccattgccaatggaagagactggtaggtgtacacacggtggtccaacagtgctagtgaaataggagtttgtacataaatcaatgtgaaatacctgagggggagaattagtgatagttgcatggattggtgacatttgaacctcttgttggaaaatgaataggagtttgccaaaatgcaacaaagattcaggaggatacattacagtgcacaaacaacatggagaaatgagtgggagtatgaatgtgtccaatgtggagagtgggcaggaagaagttctagctggactggaagtggcagattactattagtgaagcagcctccgtgagtggttagaaagatctccctgcctttgtctaatgcacaacatactcacgatgcataagaggaatgtatgagagcatcaggattccctttggaggtcagttgtctcactgtctctgtactgagcaatgatgttcccaattttggtatagattaatcgccatgtgacttgatgtgtaatatttctgagcggccaattaattctgctaatcacattagtggcaattagcaagatgctcctctgattagggggctgaggtcaagatgcttttacatgcttgtgtttactgaaaaataagttccctctttctaggacctattaatttcttccaacaggggacatgagatttagcccaaagaccccacctgttctctctctctttacctactcctgattcttgtacaaggatgacatctgatactctattagtatgttcggatttcagagaagacttggaaaaggaaccttgagaggggtgtcctgctgagcagcttggaaccttttgttgggaaggcagtgtagagtagggttgcaaggtagacagccctgagttgaatcctggttctagcatttactagctgcatagccttaagcagatgtgtatttgttttgttttttttttcttttttataatctctgtgcctcacctttccacatctgtaagataaagattgtaatagaacttacttaatagggatattatgagaattaaatgtgtcatctgttatatttaaatgttggaatgatatctgacacatagttaatactcaataactatcttcattattactattgattcagagatctattagagaatcaacatatttggagcagcaggatacattggtggtataccttatgctgatgaatcagacctaaactagttgtttagttgtgcgtccatactttgtttcagacgtcagtgaagaataagccattacccgtgaaatctaagcactgcacactgcattgtaagtacatgttgctctgtctgcttttctcgctggaccgtgatgccatgaaaacagggagcacgtctatcctgtctcctgttgcatccccaatacctagtatggagcttgggacatacacagtgctcagtaaagacttgctggattaattgaaagagaactgaacttggaggcaaacagctggttttcaatcctggctctgtgccttactaactgagcaagtcacttaagccaaacctcactttcatcatcagcaaaataaaaacataatttccctttcagtgaaaaaattctgttgaaagatgtcatatgaaagtaaatcagagtagacacacaataagtttgttttctaaatgaataattttatttgaaagaaaatgaagattcagagtcaacacctgacagattataactgcatttattgttattattttacctttataagtgtacaaatcatatatgaatatattcactttgtaaaatttataacatcaggtaatactatgtccatttaaactcgtggctgttctccaccattccagaatactgctcttaacagtgtaatgtatatatttgcaggcttcatccaatgcacttccaacacgtatatatatctgtaaaacctattgtcattttcgagttttttctttgacctaagtgacatttgataatattctaaaacttagggttttttttttccacttgtctctacttcttagagaaattttcaacttagttactacatatttacccaattctttttattacatgatattatctttcacacaagagatatatcatggttattcagtcattagttcatcaatagacatttaggttggttataatatttagcaattgcaaaaaaatgctcttgatagctgtctatctagaagtagtgctttagatataggtcttgccaaattgatctcctcagtggctctaccaacttaaatctctggtttctgccagtgatagaagagtgtctatttcctctatcttttttgacacttaatattacaaaaaaagttttcatttctgccagtctaatgagccaaaaatggcatctcatcttcctaattaatacagaagttgaacatcttctcatgtgttctgataaacactttatgtatgtccttatttaatcttgagacaatccaatgagtaaactgttactgtcttcattttagagatgtgtaatcagtggcccagaacagtcatgacattcccatagcccataaagtgaataatggtaaaatgttcacacacaggaatgcaggtatctcctgacaaatgtgctacggtagagtaaagaagtattagggactgcaggtagaataaaaatcattaataagaaaattggtggtagatagtcttaggtgcaaatgtagagtttccaaattgtcagccatctgccaacgggtacatcatttaatttcttgggaatatcagttatgacttctataaaatcagaaggaaatttctctcatggtgttactgtaaggattaaaggagataatgtatagggcataggcagctttcgagaaatgttaggtgctcttttgaattgaaaaaataaagtcttcctggcacatgggaagctgttgcttatgaaatggttaaaacagagctctgccggggcagggacactcaagtttctgtccctggcagagctctgaggcttctgcttggtgcagcattcgtttctgctttaaacctagtgcaggagattattctttcttccctgagggatggtgaggaataaccagactagccgatcttattgagtcctcataagcttcctattaatagacagggtagttatctgtatatgcagtttatagatgaggtcactgaactcaggatgagaaagtgacttctggcagtacctgcaatctttgtgttgcccctgatctggccaccccaatggccatggaataggctatggatctgcaactccaaaccctgcctgaaccaagcccgcttcaaactttgccctgccacagggaccccagataagtgcactcaacctctttatacagggccctatcactgcagggccattctcaggcattacttggtcccatcaaccattcactcttaactaatctggtgcctccctgaggccatgaggcccttttattccccaaaagttagcactgatggtagcccccacaatagctctatttagccattgcaaaaatgttcttggatagctagctgtctagaagtaatgctttagatataggtcttgccaaatttttctcctaagtggctctaccaacttacatcatatgtattttaacttttattttataggctctggggtagatgggaaggtgtgctatataggtaaactgcatattacagggttggtgtacagattattttaccacccaggtaataagcgtaggaccctataagatagtctttgatcctcaccctcctccctccctctaccctcaagtactccccagtgtctgctgttcctttctttgtgtccctatgtactcatcatttagctccacttatagttgataacatgcattattcagttttctatcctgtgttggttcacttaggataatggcctccagctctattcatgttgctgcaaaggacatgatctcattttttttgtgtgtctgcatatttttgttgagtacttattttgtgccagggactttggtaacagcgccttatttactagctatatatgacttcaggcaggttcattaacctccttttccctctgtttcttatccgcataatagggattaacagcagggctcactttccgtggcgagtgggaagagtcagtgggttagaattcatacattaaacatttagcgcagcactgggtgcattctgagagctcaacaaatacgtaccattgttgatatgctgcttttattcccacagtcaccttatgttgtaggttgatagttggccccattttacagagggagcaatcgagcagagtgatcaagtggcagccagtcagtagataaataggcatccagactgcagagtgaggacaaacatggcttttggcaccagagtcactcatgataatgttgattaagatatggccagtgttgtttggctgcggtctgtagcactctagttttgtatctttttttcttttttgagatggagtctcgctctgtcgcccaggctggagtgcagtggcgtgatctcggctcactgcaagctctgcctcccgggttcacaccattctcctgcctcagcctcctgagtagctgggactacaggcgctcgccaccatgcccggctaaatttttttggtatttttagtagagacggggtttcaccatgttagccaggatgatctcgatctcttgacctcatgatccacccgcctcggcctcccaaagtgctgggattacaggcatgagccaccatgcccagcctagttttgtatcttgatgtctttgtcatgcaagatgctgtccttgtggaaatccacacacactgtctgctggtatctgtttgccaaggattcaaaagcgttctcactgttggacactggtttggtgaaagctcccaatgaaggcaatgtcaggctcaaatgccggatatttcaagtgaacacagcctgtctgatttctttccctcaccctcactggtctacaggaagaaaatgcagacacctgtctgctcatcttttgttttccaagtgggtctggctcaccttctcccgacctgcctccctggccaggtgacctgtcttccttcagtgttcacatggatctctatggaaactgtccatctggacagagagagggcagctgcagagaagaagcattccagagtggtagcgtgtatgagaatggcaggagaggaagcctgcttactggacacctcaatgccacactttatgcacccttcacccccattcccttgcacaacaaccattgacccaatttacagaagtagggactgaggctgagggagggcatgtgcctgcccatatggaagcagtgaagctgcgatgacagcaaatgcgtttatagaattgactgttagccagacctcaaggcatcttgtatttattaaggcatttaattctcactgtcaccctttgaggtaggtactattgtaatcatccctattttagagatgaggaaactgaggcacctagaggttacttgcccaaagttacatagctagtaatggcagagctaaaacaccaacttgagttttttctcttaattgtggtgctcacctgtttaccagataagtgcaaacccaaagcgagaacacactgcccattgtgtgccatcccccacctactcctggtttccaggtaattgattgactgaaagacatcatggttccttgtcagctccatctgtggtcttcagaaagaagatcaagattcctgagagagacggctcactgccgggctgggaaggaccagagttgagacccggcggcacacccgcatttgattacccagtcctgcaaaggaacactgagcttgtggaacagtccagtccaaatgcctctgcttgattttctagaatcaaattaggctggtgaataggccagtagcgatttcatcaatttctcagcctttggcctcctgcaatgctgcccgctgtttactaagcaaatgggcttccagaaccagtcccgctttagtaatgcagcagggcaacctggcggagggaagattacaggtattagaggccatttaggatcatttagaatcgagctgttttccgagcaggcaattaatccagttgcattaaaaggcgctgctggggctcccataactctccctgcattaagagtggggatttgagaggctctgctaaacgacttgcataactagctctggggctcagtggggcatctttattgggggtgtagactgtgggcctctccctcgtgagctgtaggtctgctttgggaagaaaatgtctgtattgaaaggactgggtttatacctggagcccatgactggtcaagcctaagcacctcccagggtcgtgggagagatgttgggggaatggtttcaggtctaaggatatggttgtgacacaaagaagcaaatgcacttcctcagggcctctttagttatttaaggtggaactgccaaggtggaagtactacacaagaccaggaatttgagactaacctgggcaacacagcaagacactatctttaccaaaacattttctttaaaagttaacaagtcatggtggtgcacacctgtggccccagctacttgggaggcttaggcaggaggattgcttgagcccaggaggtcaagactgcagtgaactatgatcatgccactgcactccagcctgggtaatggatttgagaccctgtctcaaaaaaagatggaactggccatagctggatatagcccttttatagaaggatgtgaatggattgctggaggacttctagaatcatgccatgcactgacatcccactttgtgctaagcacttgtgcattccttatatcagcctcacaaacagccctatggggtggggacttcagagatggaagctgaggctcaaagaacctaatgaacttgggacttgaacccatggacccatggcagctgaccttgtgccctaagccacacacttcttccaagggtctgtatccagaaagctctgttgttcttcatccccaagcacgagagagacaaagggtcccacagcactgcctcctctcgtccccatagccttgcctatccccagcccaagttacggccactgactacactacagtgacattgttagtttaagcatctgtctatcccaccaggctcccatgagggcacgctcatcttcccagctccagcagacagacaatagcacggcttctcaaataaaacatgcttggctgagtcccttcccttttctgtatatgtttcccttgcagtaaaatgagagggctggcctccctgctgaggtctgcggtttcctctatctctcatgtgctgtgaagctgcatctgtaagcctgtggaggacagccaacatctatccaaagtagtgactgtctctttagagggacaggtacttcccggagcactgggagtccttgctcctgtacttggttgcttgcacgtggcgttattcttcagcatttatccatagtctgaattccactgacagccacttgttctcaaggttggctataccccaaaatgaaactgttggaggctgcagccaagggcgcctggcagccaggaggcattcagtatgaatttgctaaatgagtgcctgagaatggctgttgacgatttgattaaggcctcgcctaaccagcaccagtgagtcgggcatatctgccatccccaagtaaaaatgataattaataagaaggtaatcaatttatagaaacctcctttctttctcaatttctggtgatgcccttttgcctgttcataaccccttttaactaagtagattgctctttgtctaccccataggtaaatttttaattttctcttatctttactctgttcttctgaatagaaaaggagatagactcattgcaaaatagtaactcattgcaaaacatttcagaacttcacagcccataataaaaaagagtacccctgaagaaaaccaccattggcacttcagtatatattaactccggaaatttcaggttttaagttgccaacttgacaggattacaaagaaagatagcttccaaaccgcaggtgggtcacatctccataccaccaacaggtggcagtaggagttacatttggaaattttagttctaaggatgatgtcgtttgcttctctgttaagcatttcctgtgttttgtattgggttcaaggtgtggaacactgtgctgggcactgtgtcacagggaaggtgctgggccatgtttctccggaaaccactgacatccaatttatcccaggttctagttgaaaaagcaaatacttggccactatcccaccccaccaagtcagaagtagggctcctggatgcacaagtactgcaaagctggatgcctgaatctccccgctctattccctttacctttttcctcaagtgacagcctggggtgatgatggtgggacaaaccaccggatcagaaagaagccttggtccacaggagaagcacatgcaagttcaaaaacataaagaagagaacaagaaaacgtggtactcagaggttgaatttccttttcccacatggatctgattaactcttcttcccataagcctgatcccaaaagccacttcctcttcaaagccttccacggtgtcttcaggctaagctaactgttttagattcaatgctcacgcagcagtttatacctcccccaacacttaacacattatgttgtgattatctgtgtctgtctctgccaccaggatccacactccttatggataggagccacattgcatggtgcctggcatgcagcgggcatgcagtgactgagcaatgaatcgctgggtgacttagagagggttggtaggagtgcttggttggacccactttctgtgaaagaaggtgatctttaaaggctgggctcctttcagagatatgcctcagggcttgctacagtgaaccacttctaatttctcagtgaatctgtggaaactacctcatcggcctatgtacaagccttctcttttctcaagatagatgaaatcaactaatagctagaagcaaggagcaagtccacagtcttataaactcatccaggatcaacacaacccaatgtaacaaaaaggcttgctgtgctctttcaggtaaagaaacggcgagacaagaaagcagggagatggtgggagaaggcgatgagttaaataaatcaatttccattggctcaggtagtaatgtttcaataaaaaggcagttgtatgcccaaaggacaaaaccatcaagtcttttttttcttttttttttttttttttcctctaacaagttgcacaggaataagagttaggtcttttgatattttaaaatttactttgaggccaggcgtagtggctcacccctgtaatcccagcactttgggagactgaggacagtggatcacctaaggtcagaagttcgagaccagcctggccaactggaaaaacctcatctctactaaaaatacgaaaaattagccgggcatggtggcacatgcttgtagtctcagctactcgggaggctggggcaggagaatcgcttgaacctgggaggtggaagttgccgtgagctgagatcatgccagtgtactccagccggggcagcagagtgagactccatctccaaaaaaataaaataaaattgactttgtgcaaggcgcctagagagtgttttcagacttgatgatacctgttatcagcagttggctcctccttctcccattcttccatccatatctgatgatccaacaaggtcatccttgtttcacatgtgtcaaacccggctcattagacagtcgtggtatcacggtgcccttccccgtactattcactgggacttttaaacctcagataccttttattacctttaccaagcggatttttaaactaacatctttttgaactcagaaattatattccctacaccatttttgaggatcttcgaagtcctatgcaccatgcgtgacatcttataggtgaggaagctgaatcagggttatgtagtgaaacttgagcacgttaatttaaaatttaaaaggtcgtttctgtttcatattgaggttttaaaattctccaacttttcacaagagctagttctcgcaggaagcatacaatggttcaaaaagatacttgtgacaaactgatagttgacacggtcatagagagcgagttgtatgaacaaaaagtcaggacacaaagtctgacaggtgagatgcactttctagcagcaaaggcttaatctattttaaaaatgaaactatcccggaaaaatccaggatatatggccacagtcctggaatgttttgagatagagatatctaagattaagcaagcataaaatgcaattgattttatgtcttagtatttatatttcagggatttaagctgtaacactgtgaggattcagataatgaaccgtttttagtaacttttttcagagtttgcccttaattgtcgtaaggactacttatagcattggttatcctgaggctgacacttggaattgtatgtaacatacacatgattcatcagagacccagacccaagatattccaggcagggcatcaggagtggaagggggacaaacatttccttaacttcagaaaagtaggtttgaaattaagagctttgtctttaacatgaaatattgaactattcatttatccattcattatccatttattagatgaatggataatgaatggatattcatttatccattcatctaaccacacatacttattgaacatctagtatacgccagacactgtgagcagtattgggacataaagacataaagtggacataaagacagggaaatctggtgctattagatggtatatggcagggctgttcggcctgtgaaagctacccaaataaatgaaatttgagctgagttctgaagggtgggtaagcatgaaaaggcaaaatgtgagagaaagatcttctaggcagaaggaactaaatatgcaaacacccgagagctggaagaagcataacatgttccaggaacaataagaaggccagtttggaaaatggttcaaatttagaagggccgacaggagccagatcatgggcctatgaggccatgctgaggatttcatccttggcctatgaacagtggaaaactgttgaaggattttaaacaagagagtggcatagttttgcattttaaaagattctatattctactaactagaacttggaatttattttttccttagaaataacttaataaatggtagttctatggagccagaataatgctattaacacaatgcatccagctaaactgcctattggaaagctggtcttggttgccaaataccacttacaacttggttcctataagaaaattcattccaaattccagacaacctaattacaaatgacattttcagggacagcctacaatctacttaggcttgtgaaaagcctccaacatttttccatatcaaaggttgttaagaaaggtgaggaacagacttctgattttgagatagcaaagacccttctgctccttctgctttttttccccttctccataagaagaaaaatcagaaaaggaaatgcaagtgctgtggtaaaactaggaagaatatattatgttggaaaataatgatgaggaaaggtggcaggttgcagtgtgtacattaagggtgtggtcagatgctgagagatgacatctgtggctgcagaccttaaacaaagtcagcatatctgcaagactgacagtgtaccataagccaataatcccttcgatgtcaatttcagggataaagcacataggatgggacaattcctgggtacagtttggcaccatggagaatcaaggaaggaaacactgaataaagaaccaagaagtcggccgggcacggtggctcacacctgtaatcccagcactttgggaggccgaggcaggcggatcacgaggtcaggagatagagaccatcctggctaacacggtgaaaccccgtctctactaaaaatacaaaaaattagctggacatagtggcaggcgcctgtagtcccagtcacttgggaggctgaggcaggagaatggcgtgaacccgggaggaggagcttgcagtgagctgagatcgtgccactgcactccagcctgggcggcagagcgagactccatctcaaaaaaaaaaaaaaaaaaaaaaaaagaaaaaagaaccaagaagtcagtctcttagaacggtagagtagaagagacttaatcctatgacattaatctttgctggctaaaataagcaatgtacacaaccaatgctatgtaccataaggaatgttactataaactggagagaatttctgctatcttagaacttggccctgctccacgtcaaataaaaccttctacaaatagctgattcaagtaggactcaactcaatcagagattggtaataacagttattttagagataccagaacagattctacacaaaaacttataatacaatcatggaaaagcataggaaaaagacaagttaaaaaaagaacacttgccagaaagtgttgtcacagataaaaactgggaccaaatttatcactactaattttaaaagaaaattaagcaattatcttttctaccaaaaatatgtcacagagaagtatcaagcagaggataaagtatgatcttgcttccattaggagtgaagtagaatagcaaaataaagtcatcacagaaacaaaggggccatattggaagcatcacaaagaagaatgagcacttctgaaaacattaaaggcatgaacaacaatgaggaaaaggaaatggaaatcagtaaaacgttagaaagcattagagagaaaatgataaacatggaagacaaaggagtctaacatacacatatgtggtggccccaaagaaaacactgaagaatgataagagaaaaaatccagatagaacacaagaatttgctgcagaaattaagagagtcttaaacctaaagaaggaaatatcacattgtgttctggggaaacactctttagaatattcaaaacaaggatatatcaagtaaaattaatggactttaaatctaaacaaagaattatttggtgtacaagcaaacatatcaatggcctacaaaattaaaaaaaaaaacactctccatagtaacattaaatgctaaatgacagtagaataatatctgtaaatatttcagagaaataaagtttgaccctgaaaatctgcaaccagcaaaattgccattcacatataagtacaggagatggacaatataaacacacaatttcaggaatatggtccccattaatgtttattgttaaattattagaagataaactctagccaacaacagatagattccgtgttctctgcctagtctttttgctgtagcttctacattcataaaaatcacaactcttcatattatagagactcgaagaggtaatcagagaaatttgaagagataattagggaaatggaaatgtggaaattacccaacttactttcactatggccaatattgaaaaccgtgtatcctaaaaaaatccttctgtaacaattacgtatatgttgggagaggacgagtgtgtgtttttaagtgaatgactatgcttgtgaaattaagggaaatatccaggggacaaaagtgaaaagagagctgagaatagagttgtaagtgaatatacagcactgcctgccctaggaaaatttctcaataaaaagaaccttgagtttcagttttattaaggggagttagaacaaaggctccaccctgaataaagcttatgtacttgaaatcatataccctcagtgaatgaccaaatatggaaaaaatatttaaaacatttacagaaataaaagatgagccgggaacaatgacttacacctgtaatcctagcacttcgggaggctgaggcaggaagatcacttgaattcaggctggagaccagcctgggcaacatagggagacctcctctctacaaaaataaaaattaaaaaattagccagctgtggtggtgtgctcatatagtcccagcgggaggctgaggtggaagaatagcttgggcccgggaggtacaggctgcggtgatcagtaatcttaccactgcactccagggaacagagcaaaaccctgtctcaaaatgcatgaataatgggataatggattgagaacaccaaatgttgaggaggcatatttttaaaagaatcaaatataatttagataggaaatgacaaactcagcagacatattatgaaggaaatgagacatacaggagaagagaattaatgaattggttggaggctagaacttaataccctcattgtagccaagaagagagagagagaaaaaaaaggaaaacatgaagggaataaagaaacatgttagtgggatgagagtctcacatatgtattctgtaagtagaaactgaaggaagggacaatattcaaagtgagatgaccaagtactttctagaactgatgacagacaccaattctcagtttcaaaaagccagtttatcctaagcgggataaataagaaagaatcaaaagacacttagatttattacaggaaatttcatagcaacagaaaggtcttcaaagaggctgaaaatgtatacagatcacttgccatggaatgactaactcaaagcaggtttctcaacagcagcaatgaaagccagaaaacagcgaaaaatccgcaaaatgaagagagaaggaaagaaacaaaccttaaattgcatacatggttgatagtatgggtaagagaaaggtattgtaataaacaaaacctaagagtaaattgccaataaaatctcataggaaagtcaaagcattttagctgaggaaagggaaaatcaatctctttccccagaaaggaagaaaagcctactatgcaaaaatcagtggtgagcaaggaaattggtaagcagaatgggaaatctaaataaacactgactatataaaaaatagtaaagttcaagttggtatatgtgtgtgtagaaaacatgatacaactaaactattggtcaaccataacatgtaaactgagagggagtttctatttaatgtattccaagatctttggattgctgtggaagtgatgtattgatactacttagacttcaactgagatgtgtgcaattttttttttagagatagggtctccctattttgcccaggttagaatgcagtgactattcacaggtgtgaacatagcacactacagccttcaactcctgagctcaagtgatcctcctgcctcaacctcctgaatagctagaactgtaggcacatgtcactgtgcctggctacaattttaactaaaagatgcagatatatatatattaatttctgaaacaggagagggaaaaaatggaattaaagagagggtaaaaaatgtttagaaatttaaacatgaagtaaaaatatagaataagttgaaaaactaatatcaaacttatcaataactacaatatatgtctacgtcattgtactaaacttaccaatcaaaggagacattgtcagattaagttgttgaaagaaaagaaaatgcaattggctggaaaatgacactggtgacttagtttttaaattttccaaattccctcacacaaacaaactgaaacagcaaaacaaaaccccatgaacaatatttacaaaacacctaggaggcaagttatccctataaattacaaataatgagtagagagggtcaaactattgacaatcaggttgtccaacaatgagacattcaaataaaatttctggactttaaaagaaaaatgaattctgtgttcattcaaggcaaaactaaatcacttgtcaaggaaagacgatcaaattattatgagactgacagctacaagatctgcatggtgtcaggactactcagggagaaggagaggaaagtaataaggcatcgtatgggcttcagagtcacacataactaacaggtacttcctggaaagctcaaacatcaaatttgagaattgtagctaaaactgtgaaggatcttgcaattttcagtagaggataaaaacaaggggtcaacagtaagaccttatgtgtctggagtagtctaggccctgtggactctcagaaggaaccagtcaaaattcccttccaggaataaacaatgaaattaaggatctaaattgagtagcacagagacaacagtgacaagaaattgaagatctgcgagtatcagaaaatgagccaccatattcgtgcataccatatacaggagaaaagagagctctgtgagtttagaaatgaaattttggactatattctcttctaaatgctcagggaaaccaatttcatataaatgggaagacagaagataatcgaaataaaaacacatgcaaagttagtgtcaagaaaaagaaagccgggcatggtggctcatacctgtaataccagcacttcgggaggccaaggtgggcagataatttgaggtcagggtttgagaccagactgaccaacatggtgaaaccccatctctacaaaaagtagaaaaacttagctgggtgtggtggcacacacctatagtcccagctactcaggaggctgaggcaggagaattgcttgaacctgggaggcggaggttgcagtaagctgaacttgcaccactgctctccagcctgagcaatagagtgagtgagactccatctcaaagaaaaaggagaataacacccctccagaaaatcaaagtttgccaaataaatgtgcctacgagtcagatgagaactatttcagaaagcgttaaagacattaagaaaatgatatgagacacaacaacaaaaatcagaattagaaaactcagaatgtagtcataggactcaggaaataaattataaatttaagaaaatatatctaagaaatggagactaaggtagaagtcacacacgaataaattcacacaaccactagtgcctggagaaaactaagttaaagaaggaaacttttacaaaagcaagaggcaactagatccaagagaaaaggaaaaagttacaagacaggctaagaaaatcattatactggaattcccaaagaagaaacccaaagcaaaggcacaaatatcaaaaagtaaaatttaagaaaaagttcttgttgtactatttctttttctgaaataacttcaataattacttattgaaagggcggtcatacctacttgagaacaccaacctggattgccaacactgagccatgttttagtaaaatttttggacctcaaaagaaaataattctttcatgcttccaggaaaaacgactaagtcatacaaaaaggaaagaaaaccagaatgttatcagtcttttggcagcaatgctttgtgccagaataaaataaagtgatatatttattatactcaagtaaaaaaatgtaaaccaagcactttatatacagcaagactgactttcaagcattaaaaactgcaaattgctatcaacatgcaggaaatcagataatattgttctaatgggttcttcctgaataatctactcaatgagtttcagtcaaccaacatgattagagagatatcagcataaaggctactggtgaacattaaataaatattctatggaaaaaagtacagtattgaatggctatatgctctgacaacataaattcagcacacctattaaagatgcaggaatattggaaaaggatctataaatcaatttattgttttaataatcaaataaatggacgtagtattgaaattacttctgtcattctgagactgttaggtgtacaacatagaaagcatgacattctaatttctattttacccttatctccgtgagaaccaggattcttggtgaagaagaaaggcaatacatttgtaagataggagaacttgtagtcctaaatttaaatcgtaagtttttatatgagcttaaggggtattttatcttgaactcatatgaaatggccaaaatcttggtaaagcatgaatgaaatttgttgaactggaatcagaaatatcagaatggatagacaggtgagtaggtaggtaggtaggtaggtcactaggtaggttagataggtagatacacatagagagagatatgtatgtatgtatataggtaggtgggtgggtggatggatggatggatggattagataggtagatgatagatagatagacagacagacagatagtcacatatgtatgtaggttggtgggtggacggatagatagatgataggtagatagataaatagatatgggtttgtgtttaggcatgagttactatctatctatctatctatctatctatctatctatctatctatctacacacacacccatacatacatatatatatatatatatatgtctttccaagctctgtctgctgacaagccctggaaagaatgatatcctagtaacaatgaacacaactagcatgcagatcttggtttctaaataccatctcccataaaaggaactaggcatccttagataaatagttcatctcagagctggggcagagaaaatacaagatgaagttagagtaagcatgtagatgcaatgaccctgtattttaacaaataaattgcactgggaaaattggagagtagtaggctggagacaggactgatagactagaagagactgaaggcattgtctttaaaaatatacaaccaaaacagaaaaatctaagccgtggtgcctggggatgtgtatttggaagacaaaactataaataaaagaagaaaggggttattataaaagtcatgatactggttactttgaggggccgaaaagggtatgttactgggacggggattccatgatggccagcaaattgtatttgttgacttgagtgctgatgtcgagactatttgcttcataaatattcattaagctctatatttgtcctattctgttttctatagttatactatattttacaatagaaagttttatttcattttttaagctgcatgttccttaagagacacatcgccaatataagtattcaaaaagacaggaagtaaaaaagttgagaagtttcatacaatatttttgaatagaataagatactctgggcaaaactaacaaaaagagagttggtgtagttataataatatcagacaaaacagagcttaaggcaaaaaaaattattatgaaaaaatgaagctatgtgatgaaaggataaattcactagtcaggtacaataattctaaatttgtatgtaccaaataaagcaggttaaaacatatgaaataaaacttgattatactaggaggaaaaattttcaaatgacacatcatagtgggagattttacacatctcagtaatttgtaaaccaagcatataaaccacaatgaggagttaaaagatttaacaaaattaataaaatctttaaaaaattaaagaattctatgtttggacgtcagaatacatattcttcccaagtacacatggatgcataaaattgatcaaataaggactcaattaattcaaaacatgaatacacacaaacacacatcaatatctatatctgtctgtctatctggaaagacagaagaaataagtcaacaacaaaaatatagccctattaaatgtagattagtaattttttaattccaaacaaccactcctgggtcaacaaagacatcataataaattaaaatctacttgcctactctaaataaagctactatatattttgtgtaagcagtgtttatgcagaagcttgcatgtgagtgttcattgcaccttcatacgtaacaacctcaaaactagaaacaagacagatgtcccttgggtgaatagttaaacaaattggtacctgcacaccattgattactactcagcaatacaaaggaatacatacaaaaacctgggtgaatcttcagagaattaggctaagtggaaaactctaatcccaaaaggtttcatgctgtatgattctatttatataacattcttgaaacaataatttaaaaaaactggagaacagattagtggctgccaatgttaagaaggagttgcggaacaaaaagaagtgaatgtggctatgaagggcagcatgagggagccttctggtgctggagatgttctgtgtcttgactgtataaacatgaagaactcgatcaggacattgcaccatagttttggaagatgttaaaatgggggaaactggataaagggtacatgagagctttatatattatttctcacaacagcatgtacatctacagttacctcaaaataaaatttcagggaaaataaataaaatactgtacattaaaacacagggtatagtgaaagcaagatttattttctttaatccttattttttaaaaggctgaaaattattaagctagtttttcaagctaataaaccagaaaaagaaactattttatagattcaaagacagtaaaataatggaaattattaacataagaacaaaaattaatggaacagaaaaaatcccagaagatcaacaaagccaaaaggaagaaagacaatacacatactcacgcacgtgcgcacacacaaagaattaaggggaattatagttagtctacagatatggcacaatttaaaataggagaatactattgattaccatattctaatgcatttaaaaatttatgtgaaatggataactttcaagaaaaataaaatactatcactaacacaaaaaggaatacctaaattctgttaactgtgaccatgaaagaaatccagacagtaaaatcttgacagcaatctaatagaaaacacaaaacagggtggtagaaatatatctaaaacaaagatacaaaattatctgagaagagaccaaagttgtctcctagatttaaaaaaaaatccagttttatgctgtttataggagtcacaacttaaaacataaaatcatggaaaggttacagataaattagaggaaaagggacactaggaaacactattaaaatgacagtttgcattaccagagataaatataaccattaatataccgacaaaagtcaaattcatcctgaagatataaccacctctaaactgagtatgacagtattaacatgcctttaaaaattcaaagcaaatgttagaacatcaaggagaatgtgacaaatacattataattataagcaatattaatatattctctctcagtaagtaacattttaatcaggagaatatatactatcaggatgacgatttgaacaatttcaaagtgttcaatgactagaaaccacatattcattccaagcatacatgagaattcataaaaattgaccatttgttaggaatgaatcctcaactcaatctgttatcacacagactacattccttgtttataattaacataaaatcaataaaaagtaactttattttaaaatctgtgtgtggacttaaatctctcctaaattactctggagtcaaaggagaaatcacagtgaaaattggaaaatatgtagaacttaatgataatgaaactattatatgtcaaaatgtgtgaaatgcagttaaagcagtatttagggagaagtttaagccataaatgtttatgttagcaaagatgtaaagttgaaaattaatggactatgcatcacacttcaaagttagaataaacaaagaacacagaaaggaagaaataattaaggtagaaacagaaattaattaaatggaatgcatatgtacaatagaaagattggcaaagtcaaagttaattccataataaaagctaaaataattgataaacctctgccaaggtaaaatgaaaaaaagagagaaggtacaaataagccatattatatgtgaaaaaatacgattataaatgcatcagtgatgtaaaagataatattataatctctatgctaattaccctaaagaattaacctgaaatgagtgaattgtagaaaaatattaaaacttagtgaaaaaaaaatctgagcagtcctgtaatctttaaaggattactttataatctgtcaacaatctccccaaaatgaaaacatcaggtacaaatgatttaataggcaagttttaccaaacatttgaggaaaaggaaattctaatcttacataaaatcttacaaaaaagaaatgaaactttctctgattaattatacttagtaaacataaactttgtgccaaaagtagataaggacagcatgagaaaggaaattatagctttattttcttatgcacattcagaaaccaaagttagttagcaatttattagcaaaaaaattgcaagagccaggtttatgcaaagaaaaacatgatgactaaggcgaattcattctcagaatgctagcttattatgtagataaaatcttagaattcatatgagaatttgccaatgtttctataataagaaatattaaaatgtcaaattacaggctgtatttcgtattggaattcttatctactacaagtgaatcttggtacaaccactttggaaaaccagaagcgtatggcaggatctacaaaaactaagtatatgcttaaccattaattctacttctaagtacaaatgagcagacatgaacacctaagtatgtaaaaagatgagcccatgaatgttcatactagccatatcccccaaatgtaaactgtttaaaaatctaccaacattaatgtgcataagttatagtctagtcatgtaatataaacctatacagcaaagagaatgaacaagctgtagccatattcaacatgatgtatctcacaaaaacaagggggaaaagctagtcataaatgaatacattctctgtcattccataagtgtccaaaagatggacagctaatatgtggtaaaagggatgaacatagtggttatctttatgaggggaagtcactggttaagatggttctcatatcatggtgatgtgttcattctttttttttttaatttatttttttattatactttaagttttagggtacatgtgcacactgtgcaggttagttacatatgtatacatgtgccatgctggtgtgctgcacccactaactcgtcatctagccttaggtgtatctcccaatgctatccctcccccctccccccaccccacaacagtccccagagtgtgatattccccctcctgtgtccatgtgatctcattgttcaattcccacctatgagtgagaatatgcggtgtttggttttttgttcttgtgatagtttactgagaatgatgatttccaatttcatccatgtccctacaaaggacatgaactcatcattttttatggctgcatagtattccatggtgtatatgtgccacattttcttaatccagtctatcattgttggacatttgggttggttccaagtctttgctattgtgaataatgccgcaataaacatacgtgtgcatgtgtctttatagcagcatgatttatagtcctttgggtatatacccagtaatgggatggcaaagatgtgttcattcttgatctgggtgctggttacatggaccacgctgtttgaaaatttaaaaaactgtacacttatgacttgtgcacatttttgatctattgtacttcaataaaaagcttattcaagaaagtcattgcatttctgtaccccagctgcaaacagaaaaagtattaaaaatgataataagtataatagcaaaatataacttcctagggctgaacaacactcgtccatgttttttgttttttgtttttaatggagtcttgctctgtcactcaggctggagtgtagtggcccagtctcagctcactgcaaccacaccctcctgagttcaagcaattctcctgcctcagcctcccgagtaactgggattacgggcacatgccaccacacctgactaatttttgtaattttagtagagatggggtttcaccatgttggccaggctggtctcaaactcctgaccttgtgatccgcctgcctcggcctcccagagtgctgggattacaggcatgagccaccatgcccaaacttgtccatggttcttatgaaaaaaaattataaaattgcattgaaaagttttaaacgtgacctaaatagagagatagattattggataaaaatacccagtgtgtttaagatgttgattattctcaagctaatctatagatccgatggcaattaagataaaacccccagtggaacttgacaagagagttctctgatttttacagaagaggatatccaaaagagaaaatcatgaagattgctgccctcccggtaatgaggtcatactataagttacagaaattaagagaatgtgaagttagtacagggatttacaagtagagcaggatgaaaagtcagaaataggcctatacatatgtggaacggttttgtaaattgttatgacaacaatcctacatagcgatagaataattgattttccacttggaaaaattgctgggatcctatcactcactatgcacagaatcaatttttgatgaataaatgtcttatttataaaaggtaaaccttcatattaagagaaaaatatagacagaatactttttgactgtgaggtagagtcttcttaaagattatacaaatagtaatgttaatcaaatgtgttaaaacgttgaatttctcttcttcaaaaggcacccccaaatcaattgaaaagacaaaccacacactggcagaaaatatttgcaacatacaaagccagcaacaaataagtatctagagtaaatcatgaatctcagtgaatcaattttaaaaaggcatttgaaaagaaaagaaaagcgtgaacaaagaaaatgcattttataaagttggatgatcacaaagaactgagaaattgtattaaaatcttagaaacagatattaaaagtactaggtgatatgacttcatatcccatatgtaagaaatgtttaaaagtgtgacattatcaaacatgagcaaggatggggagcaggagggtgccgatacatgcaggatcaattggtcaagccacttcaggcaaacattggcattttattataaagcaaaagatgaatatatcgtatattttagccattccatcctggaggagctaacctaaataaacccatgtttatcatggattatgcccaagaacattcctagcaaatttgtttgtacaagctaaaaattgataacaatctaaatggaccatcatagaaaaaatgagaagtaaattgtcatatttacgctcaatggggctactacacagcagtgaaagtgagcaaactatagccaccagtatcaaaatggatgaattccacacatactgttcagagaaaaatgaatattagagcggaatgcattcactatgattccattgacatcaaggcttaaacgttcatttttcattggaggtttatcactgcttatgtatataagcagttgaatgactaaccccaaattcagaaaaatgggtgtttcttggggtaaagaaatgtatgaattagaagagtgcagcaaagtggaattcagagatatggataatgttgtttctcaaactgctggtgaagagtgttcttctgatgatcgttctttacactttatgtgtagcatatatatttcccagcacctggaaatgtaatagaatattaataacaaaaaattatctcatgcaagtttcaagtaaaagaggaaaccaatattaaaattgcaaaatatctagaaaataagaacacaaaataatacaaataggtataaaataatacatatcagacctgatgggatacaactaaaacagtgaacttctggacttaatgtctactctctcatgtttgttaatctgtgtgaattaagaagttaactcaataaattagaattttttcaacagaataaactgaaaaaagtagaagaaagaaaattgggtatccagaaattaacaaaattaagaaaaacaatggcttcttcaaggaagctaggggggtaattggcccagtgattttgcacctggaaaacacacacacacacacacacacacacacacacacacaccccatcaatagagaacatatgaaaaacacaataacaacattaggtcgggtatggtagctcacgcctgtaatcccagtactttgggaggctgaggtgggtggatcacctgaggtcaggagttcgagaccagcctggccaacatggtgaaaccctgtctccactaaaaatacaaaaatgagctgggtgtggtggtggatgcctgtaatctcagctactcaaaaggctgaggcaggagaatcccttgaacccaggaggcggaggttgtggtgagccaagatcatgccattgcactccagtctgggcaacaagagcgaaactctgtctcaaaaaacaaaacaaaacaacaaaaaacaaaaaacatcacaatgacaacattaaaacattgcagcctgattttttaaatgaggtagatctaactaaactgacacatccaaaatgattggtaggatgcatcactgatttttataaaatgcagaacagtgtatgcagtcagcttgaaaacatttagttaatttcttaataaattaaacacgtactacttgttagacccagcaacccaaatactggttatttatcctagataaatgaaagtatgttcacaccaaaataaatacgcaaatatttatagcagatctattcataatcaccaagaagatgtggccttcaacaagttaatagataaaggagatgtggtacatcctcatgttggaatattactcagcaattaaaatgggacaagctattaatacacacaactggatgaatctcaaaggcattatactgagaaaaggagacactcaaaagcctacatattgtgtgattccacttacgtgatgttctcaaaaagataaaaccatagtaacagaaaagagttcggtggttgccaggggttaggagttgtgtgggaagttttagggacactgtgactatggaaggatagtacaaggaagttttttggaatgatgaaaccatgctgtatcctgatagtggtggtggttacatgaaatctatatatgtattaaaattcatagaaatttatataaattgtgtattaaatttcatgaatatttggtatgataatttaaacatttacttatatatgtttaagtaaagaatatctttagaaggttgcatccaaaattgctatgagtagttgcctccagggagagaaacaagacagatggctcagctcagggagagggaggaatagaacctttcctatttactcttcttgcctttggaatgttgttccttgttcattcatgatgtacaaactttgaatgataatgtacacactatacgttctaagttaagaaaagaggttgctatagaatggagtgctttgctgtcattggtaggaacttggtctagatttagaaagcaggaggcgagtctgcaaaggcccagggtgtagccctttcagaaggaaatagaccttgccaagacattggtatctaaaaaaaaaaaatagggtgtttaccagttattactcatttggtaccaaaatcattagagtaagagttaagttgggcatatctaatcctgatctccagatacatgtgtttcgtgatctttatcgagctcctagttaaggaaccacaccagaagtaatagcatcagattcaaattattgactgaaaaggaatacattttaccctcaacttcttgaccatagtcatgaaaaaaaaaaaagtccacaaacgatgagtactatattcagtgcatttggtgaaagccttcaatcaactccaaataagacaaaagtcctgtcctggcttccttcgagtttctcttccccttgagtgttcctggtctccattcccctagacttcccactgttactgcctcacactagtcttggctaggataagtctgttgtatcaagagtttattattatttgcagaacaggttaattagtctgctttctgttgcttataacagaatacctgaaactgggtgatttataaagaaacaaaattgatttctcacagttccagagactgggaagtctgaggttcagagggtacatctggtgagaaccttcttattggtgaggactcctttagaagtcccaaggcagcatggagcatcatgtggccatgtgctaactgtactaatatgcaatgtgctacctcaggtctctctctttttacaaagtcatcagttcccttcccatgataaccccttaatccatcaatccatgaatggattaatctattcatcagggcagagccgtcatgattcattcacttcttaaaggcccgcctctcagtgattgccacattggggattaagtttcaacatgagttttggaggggccattcaaaccatagcaacaggcaaggcctttgctaatgcttttgctcaaggttattttacattttaaatttttattgcttctctggctgggaaatgtggctttcccctaatttattctgcacgatgaatagagagaaatggctttgccacctgcttgcaggactccacggttctgttacttccagtctgtgtaatttgtatgtatattcttgcctgccaccccttagttctaccgctttgtcttggtttcttgcctagcaagataatgggaaaggttgttttactctatcctttagggctggaaaaataactttcctcttggggtctgagctcttatctggacaccatagcacatcttgtatgacccagtaaatacccttcatcttgctgtgagcaggtctgtattggggctccttttttaaaaaacacacacgttatagcatgtgaattcatgcctatggaagttaaaactataacccaagcaaagttccaggaatacatttcaaaataaataattcctattattcaagaagaatataggctacaaacttttgttcctaggtagggaagggctgtaggactgcaccatcctgcaaatttgctgggactgctgtggtcatacaagccaattcttcctggggcattttcaaggggggttaggtattggaaacacaacggggccctgaacttatgcacatgatggtgcttttggactcagcaaaccatgtgtccttgtctcttgggcttcataaaaccaaattagaagtagactagacagtctccctctttgtccttgatgtgtgcccagcactatgccatgtatttttccttctcagattcttgttctcttaggtcaacccattttacagataggattcaggtgaggtgacatgtccttctacaagtggaggagctcaatttctgacttcacagcccaggttccttctttatccaagactgttcctatctatatgatcagaggtccctgtgggtggtatgtcaggattgattaaaattaccaagacacttcccgccaggaatgggtatggtactctaagtggatgctcaatacatatttgctaaataaataagacacatcagtctgaaacagcaggtacaacctgtagcctaattttacagagagatgaactaaggttcagagtgatttgccttcaacaatataagtagagaggatgagacttacttaaaagaatcctgagctattctgcagaatgacatacagtgagtataaataaaggccaattctatatcgggcattgataaatgaataaggaacaccttacaacacaaacagtttgaatagaaatataaattgatatatattaatttatatatctataaattaaatataaattatataatttatatctataaattaaatataaattatataatttatatctataaattaaatataaattatataatttatatctataaattaaatataaattatataatttatatctataaattaaatataaattatataatttatatctataaattaaatataaattatataatttatatctataaattaaatataaattatataatttatatctataaattaaatataaattatataatttatatctataaattaaatataaattatataatttatatctataaattaaatataaattatataatttatatctataaattaaatataaattatataatttatatctataaattaaatataaattatataatttatatctataaattaaatataaattatataatttatatctataaattaaatataaattatataatttatatctataaattaaatataaattatataatttatatctataaattaaatataaattatatttataaattatattatttatatttataaattatattatttatatttataaattaaatataaattaagtgtaaggataaacagccatcattaaatgtacaatgaccagagtttccagtacaaaagccaggtctattaagtaaaaatatgtttattggaccaataacaacagtaataatagctcacctgtttagagtatgaaatcaagaatgtacttctctaggcagattgtctgggttctaatttcagctctactacttactagctatggcacgatgggaaagttacttaacctctctttttatttatctatcatctcaaaatacctgtcttggtaaggttgcgttgaggaccaaatgagttaatatttataagtcacttagaatagcttctggtacatagtaagggctattctattttttgttaaatgtaattacttttaagcatctttatattctccaccacaactttataaagaatagtgctctaccattttacagatttggaaattcagcttggagagttcctatgagtagccttctctcatacagctgggattcagaccccacctttggttggccctgaagccagggctctctcccaaccccaactgttcttagatgaagtttgcattaaaatccacagcttagaattcacctttcctgctattcagcaggcgctcctagaaacaaaaccaaacataaaacagtattttgagtattctaccttagtctttttttttttgcatatctaaaagccaaaattaaggaaatggaaagatgttaatataatacacacacacacacacacacacaaaaagggtaattactgattttattaaaaacatttatcacagagccacataaccattgttatttcaggcctgggaatacaatgcatgctattaagccatttgatgattaaagataaaagcatgattaaatacgttaatgaaagtgccaggctgcatcaagaggcacaccatgcattgacctcgaagagcttgggctacctatgtgacccctttgtgaactttctcctcagctgggttttctagaaggttattttgtgctgaaaaaaaaaaaaaaagtcctgtgagtaatgaaattctacctgatccctgggacctgaccggctaccctggccttctgtcctctggctgctgttgcaacccattttccttgtcttcttggtggaattagaaaccggcccgctggcattttcctaccaattccctctattctcaggtctagagagaaaggaacaaaatgcagacaggattgaactaatatttgttaagactcaaccgctggccaagcattgtgctgtacatttcatgtattaagacattagttctgatttattatatttctatccttatcactgtcctgtttttacatagaagactggggctcagagatgctaaatacattggcgtgataattatgagtggtgtatctccaatgtttttggttctcctcctgagcacacgatgggctttcccttctcggccaagaaggcttctcccttcttgggttgggtgcatccgtgtgagtgtaagtgacatatgtctcatctccatggaagcttaaagagctagttatgggtcaccatgtgctcctcctctggcatctgcttcatcagcttgggtccacatataattagaatttgtgatttaaaaatgagtacactggtttgtgtgacagatttggaagcctgatttctcatccacacgattcaataagcatagccctataggtcctctcaggtatattatcccaattcatatcttgggccttctaacctgcccatggatatataaagtgagtgggaaataaatattggtggttttcaagccactaagatttggggcgtgtttttactcctgcataatgaggtctcacaacttatgtggacctgggagctgagatttgaatgcacttctgtctactttcaaagaccttgctctttctactgccttgaactctattaataagatgtggtcagatcctaggatccaggaggacattttccttaccatatgaaaaacaaggacagggcacaggcatagcctctggtcagaggttgagaaaacatagactcactgaggatcccagcagggaaaagtacaagactcagaatctcaaggtgaggttaaaaacgtacggattgattctgtaaccttacacaaaaatcacctaatctcagtgttttttttcacataaataatgggaataataccatccattattcaatgtccctgacctccaaggagccctgatactgaaagatattctcatttttttctcaagtcaggaaagatatattcagggattacacaaattattgtgcaacattgttcacaacctggaatggagaaaaaggtaagagatacaactgaatttaagtggcagtaatctgggccttggacaaagggattaaagaaaaaagagaagataggaggaaagtactctggaaatagattcaactggaaagcatcagtatcaccttaaggaattaagtcaataaagaaggcccaagatatgaactgggataatacacctgagagggtctatagggctatgcttattgaagtgtgtggatgagaaaccaggcttccaaatctgtcacacacaccagtgtactcatttttaaatcacaaatcaaattagtaaaacatttctgagcacatattccccatatgtacacatacttattgataaatgtatgtatacattactagagtaatgtattatatgtacattacatatacaatttgggtacataaaacatacaccaaaaaagaaatgttaagaagatggctaaataaacagaaggagacagtcaaatgtgttcttcccattgagcctggtttgggatgtatgtaaccctgagttaatggctttgcatctttctgcctgaaagtgactttattgccaccagtcatacaacgcgggaggaaaggggcatagaaaatcttttcaactacttgctctggctcaacctttcgtggagctgaatgctttaaaaaggacaatgaacaaagtgaaatatgctttaatccaattccaatgaaaagcagtcaaatggcaaatatagtcttgcttcttttctcttttcagtgtcacagaggattgtaaaccatatgtcctttggagaccaagcagagagatagccacagcttgatttgcagagatgcattaattttcacatttaagccagtagttcctgttgctcatatgaaactcaccctccttctatgaccctaaaattctgtcatttcaacaaataattgaagagttcaatttgtcacctggctatttaaaatagtagagacaggaggccaggcttggtggctcacacctgtaatcccagcactttgggaggccaaggcaggtggatcacctgaaataaggaattcaaaaccagcctgaccaacatgatgaaacctggtctctactaaaaatacaaaaattacccaggcatggtggtgggcgcctgtaatcccagctactcaggaagctgaggcaggagaattgcttgaacctgggaggcagagattgcagtaagctgacatcacgccgctgcactccagcctgggagacagagcgggactccatctcaaaataacaataataataataaagacaggagtagctctgaacttattctggtccagagggttggtggaggctgtccaataaaataaaactaagtaaataaaataattaaaagaatgaagtcgtgaatgctaccaggcatatttacgtaacttaagaatcacttgatacacagagcagtaggcttaatggctaacttgtttggttggggttaaaagaggggaaagaaagggaagagcaagttcagtagaaacttgaaagtgccttttttatagggggtcattgggatttgaattccatgaaatagtatatcgtaggtatgccctgcccagctcccagaatatcggacctatcgaatggaggctatttgcatgcataaatttcacagatgtgtatgcataacttatttctactgacctgcagagcctagtaaaatatttggaggaccaaaggctagatttataataaaacataattaaaactcagtaaattcaaagaaaggctggaaaggaaggaaagggcattttaaaaagcaagacaacgtaagatgtgagaaagaattttcaacttatcagtattctcaaaaaatgtacttaaactaaactccctaatttaaatgtgaaaatgttacatttgattagaaaacaaaatccaaattatacaattttaaaagacacatacataaaatgtaataatgcaaataggctggaagtcacaggtgggaaaaatatagcaggaaactggtaataggaaaaaagttgatgaaacattattaatatcagataaattagactgaaagcaaaatgataaattattttattaaaataagattttaattttcagttataaaatgtttgtttattctgaaagttccaacaattctaaacctgtatgcacataataacttgatctcaaaatatgtaaagccaaatttgagacagttgcaaagaggaaattgcaaatctgtcagtgagatggtttttttttaacattcatttattcattcattcattgaacaaatgtttgctgaacaagaattaattgaacaataaatgaatagatgggattacacaagttgttgtgcaacagtttgggcccacacataattaggattaccaataacattttattattagaaacatttaaaaataaaatcctctattttattccaggcatccttctaggtactgaggaaattataatgaataaatcacaattcccctgaagcttatattctggatggaaaagataatgaaaaaaatatttaatatgcctgatgttggtaagggctgaaaaggaaaaaacaaatgagggtaaagggacagaaaattaaggagcaagggagctattgtttagattgtgatgaaggtaggattccctcataaggtgacctgaatgaagtgagggagtcaatcaggttatagatttgagaaaatcattccaaacggtagaatcagtaagtttactggctctgaaggggcagagttcttggcctgttttaagaaaagcagggagactggtatgagcagaaggcataagaagaatgcttggagataccagatacatctctgtaattgacagacaaagtagacaaataactagtaaataaagaaaagatttatatgacacaattaataagaacaatccagttgacaagtataaaatgctgcactccgagattagagaatatacatttagcttaggaatacataaaacaattacaaaaatcaaaaatcaatcaataaagcaagtctcaaaaattttgagtcagcatcacacaaactatattctctaatcacaatgagatcaagttagaaagaaaagcaaaaattttacttttattaaagtttatacatttggaagtttgaaagcactcctacaaaatagttatgtcatgaaaatgtcttaaaggcaacagataagctatttagaattgaatgatcataaaaataatacaaataaaactcttgggatttggctaaactcacaatttcagggaaattcctagctttaacatgcttacagtaatgaagaatatccaaatatttaatgatttaagcaatcatattacggtaaaaaagaacaatagattaaacctaagggtaatggaaagaggatataactaatattagagaatacattaatgaaataagaaaagctaaaacagagtgtatcaacaaagccaaaactctttgaaaaggcataaaaaaacacaccaaactccttttttctctccagaaaaaaagttggcacaaacaaaaattgttaggaataaaagaggataccttaacatacagctaatattaaaagtccaagaaataaacttacagattggtaataaccaaatagcctgaaacaccaagtatttgcaattaattagaacagcaaatatttaaatactcctcatgagaatgcaaattgctacaaccacttggataagcagtttgcaatcatctattaaattgaagatgtgtataacataacatccagtgatttactcacagatatgtagcctagactagagaaactcttgcacatgtactctcaggagataaatacatgaatgttcagagcagccttgctcactaatagctaaaaaatctggcaccaacataaatgtttatgtctggagaattgatgagtaaattgtattaatagtttatatctattcatatagtctgatcttgtaagacagtaaaaatgagtaagccagcacaaaaatgagttacccaatatggataactgttgtcaaaaacgtgaagttttagtgaaaactgcaaggcaaagaagaatatatgtgatattcttccttttatatatatttcagaaacgtgcaaaatatattccaataatatttgaatatctcatttgagatgtgtgtgtgtgtgtgtgtgtgtgtgtgtgtgtgtgtgtgtgtttgtatacatatgtaattttttctaggagagtgcctatccctccaaaagcaattggaagtggatactgtagggaggggcacaagtgaatttcaaatgtattgatattgttctgtttcttaaggaagatgtttcatagacagaagtgaattttatttttcactacatatactttgtaagtgctctttttatatatgaaatgattcctattaaaatacttaatgatgaatgaatataataactttttgtcaataagtgagactaaaaaggtatatccttgaaaaatgtaactttcaaaactgactcaagaagtaaacaaaatgaatataattttaaaaaatgaatcaataattgaaaatcttctcaaaatgctaagcccaaattgttttacaagcaaatttgaccaagcattcaaagaaaatataatttctttctttctttttgcatactctttcagagaatgaaaaatataggaaaatttcctaattcattttgtaagtctaggatattttgatatcaaaaccacaccaggacaaaaaaaatgaaggcatattagcttaatgtcacttatacataagaacaaaattcaagaatgcatattaaaacatatcatggcaaagctagagaagtgggggtataaattggtataaccacttttaaaaactgtttgacagtatacaacagggaacagcaaactttctatgtaaaaaccagataataaatattttaagctttgcaggttgtactgtttctatcacaactattcaacactgccactgaggtgctaaaacagcatagacatacataaacaaataggtgtggctgtgtttcaataaaactttatcaacaaaaattgttggcaggcggaagagaagggttgtagcttgtagatccttggtgtatatagaaagtaaatatatactacccacaccccagtaattccacttctaggtatatttctcacagaaatgcatatatatcttcagcaaaatatgtgtagcgttcatgatagcactattcctaatgtttattaacttgaaacaaaaatgtttctcaacaatagaataaatgaataaatgtgggatattcatgtaatgcgcttttatacagcaatgggaatggatgaagtaatgttacttaaaacactgtggtggactctcccaaacctaaggttgaacaaatgacacaaaagagcagatgcttatgatttattctagataaaagttcaaaaataggcaaatacaaacaatgaagttatcaattaggatactggctacccttgtgggggttagtgacggggaaaggcgtgatggggtgggcttctgagggctggtaatattttgttatcgatctgttacataggagatgtcagtattgtggaaattcaccttgctgcttttttatgatttatgacctgcttgtatttatcaattaaaagtttaaacttaagaagtaaaaatagtaaatagatgaaggcaattttgggttcattgagagactatgagggttgtctgacattggaaaatacattaatgtaattaccacattaatcaaacaaaatagaaaaattatagctgcctaagtgcataaaattatttgctaagtgcataaaatcattaaactaaaaataccccttataaatctaggaatagaaaagaactttcttattctgatgagggacatcttcagtcaataagcatcataataaatgataaatatgaaaacattgccttgaaaaccaagggaaagtgaggaagggatgcaccaacactacatctatttcacttggtgttaaagacagccagtaagggcagagaatttttttaaaggggagtaaaatgaataattactggaaaggaagcaaaacaatgttatactagtcacatgtggcatgattgtctagagaggaaaaaagattacaatataaatcaaatttttgattacaacaaattataaatagtaatatgctatatcaaagtctctggatattagatcagtatacaagtcatttacatttttatataataattataaaatttaattcaaaaatattaaaatagcatttaccttgctgatgggggtagtgagtagactggcataaagaggcttatgtgattctggtaacatctttcttgatttttgtctggttatacaagggtgaagtttgtggaaattcagagatgcgtgtacttctctgtactttatattcaaataaaaagtttaaaaacaccatttacagtagcaacaaaaataaaacatatatcaaaacaagtgaaaaatgtgtaagacctagaaaattataaaatttatgctaaataaattttaaaagacctaggtaagttaagagacataccatgttagtggataaaaaaactcaaattacaaacagaactaaaaataaattaaaataaatattcatcaaaagaataatgaatgaactgtgatatagtcatacaatggaaaactggatagcagtagaattaatgaacttaagctccatgtatcataatgaatgaatctaactaaaatgatagaagctgaagaagggtatgtatatgataccaattacaactcacccttggacaatgtaggtttgaactgaaagcatccacttatacaagggttattttcaatacatatattggacatcttgttggaggtgtgcaatgatttgaaaaacttgcagacgcatcatgcagcccagaaatatcaaaaatcaaaaaatttttaagtatgtcatgaaagatgtagatagtagtctattttatcatttgctaccataaaatattctaaaatctgttattaaaaagttaaaattggccaggcatggtggctcacgcctgtaatcccagcattttgggaggccgaggcagctggatcgcaaggtcaggagatcaagaccagcctggccaacatggtgaaactgcgtctgtactaaaaatacaaaaattagccaggtgtggtggtggatgcctgtaatcccagctactcaggaggctgaggcagtagaatcgcttgaacccaggaggcagagggtgcagtgagctgagattgtgccattgcacttcagcctgggtgacaagagcaaaactctgtctcaaaaaaaaaaaaaaaagtttatcaaaacttacacatatacagactgtacatggcaccatttgcagtcgagagaaatgtaagcaaatataaagatgcagtattagatcataactgcacaaaattgccacagtagtacagtatgtactacagttaattttgtagccacttcctgttgctattgctgtgagttcaaatgtcatgagtatctccttaaaatgccatttgaggctataaaccaaaaagtatgagacaggtcttaatttagacgtttattttgccaaggttaaaatcatggcctgtgacacagcctcaggaggttctgagaacatgtcccaaaggcggttgggttacagcttgattgtatacattttaggaagacagaagttacaggcaaagacataaatcaatatatgtaaggtatatgttggtttggcctggaaaggtgggacatctcaaagccgggtagagtgtggggcttccaggtcataggtggagtcaaagatttcctgattggcaattggttgaaagaattaagctcttcctgaagagttgagtcagcttgagttaaggtaaggtaagagaggtcgagttgtggaaaccaaggttcctgtcatgtagatgaagcctccaagtagcagagttcagagagaatagatgtgcatgtttcttattagagctaaaagatgtcaaaatctcctgaaaagacctcgtaggggaaggagagtctctatagaatataacttcccccgcaagagatagcttttcaggcccatttcaaaatatgtcagggaagtatattttggagcaaaatactttgatttcctttaggacccactatctgtcatgtgatgttacactagaatcaggttggaatttggtgtcttattgctacagagtctgttttgtcagtccttaagatctctattttaatgttaacactagtcaattttgtctaacctccagagggaagagggtgtaatgagacatgtccaaccgcccctgccccctgccttcctgaactagtttattttcaggttttgggggatctctttggccaaaaggaaagtctgttcagttgactggggggcttagaattttattttcgatttacaaggctgacatctccatatgatcagttcatctttccagtacatcacttaccacaataaaaagtgatctcttgaggttctcgtgtatttttcatcatgtttggtgcaatagtgtaaaccttgaaaaacaccgtgatacccatacaaagtaccactagtgatgctggaagcactccaaagaagcagagaaaagtcatgacattacaaaagaaaggttaaattcttgatatgtaccctagattgaggtctacagctgcagttttctgccatttcaagataaatgaatccagcacaaggaccattgtaaataaaaaaagaatagaaaaggaaatttgtgaagtgatcaccacagctataccagcatgcatgaaaaccttgcactttttgcaaaatacctttttatatcatattgagaatgcggctcttatgtggttgcaggatttctataagaaaggcatatctgtagactctaatatcattggagtaaaaggcaattattatatgacaacttaaaacaaaaggaaggtaaaggatctaaagctggggtatgtaatgccagcaaagggtggcttgttaatttttgaaaaagatttcgtttaaaaaaatgtcaagaaaagagcctggtacaatgttgggtgcctataatctcagctacttggaagtctgaggcaggaggatcgcttgaacacaggagtttgaggtcagcctgagcaacagagagactttgtctcaaacaaacaaaccaaaaaaaatcaagataacaggagaagcagcttttgcccaccaagaggcagcagacaataccccagatgccattaagaaaataattgaggagaaaggatatctacctgaacaagtttttaatgccagtgaatgtgccttattctgggggggaaaaatgccataaaagacattcagttataagaaagagaagtgagcaccaggatttaagacaggaagagatgtgctaaatctatgattctgtgcaaatgcactcaggtttatgacaaggactacccttatctgtaaagctgctaagccctaagccttgaagggaaaagataaacaccagctgctagacttctgattgtacaagaagtcctggacaacaaattctgaattggttccattcgttctctgggtcaggaagtaccttgctggtaagggactacctttgaatttattttgctattagacaatacctctggccccctagaacccaatgagttgaacatcacaggcaatgaagtggtctgcttgcccccaaacacaacgtctctaattcaggggtcatgaggatctttaagtttcattacacattgtattctatggaatgcattgtcaacggtataaagagagcccatgaaagtctgaaaggattacaccattgaagatgtcatcatcgttatacaaaaaaccatgaaaactgccacgcttgaaacaataaattactgctagggaaaactgtgcagatgttgtgtgtgacttcacagaatttatgaccgaagcaatcaaggacattatgaaagagattgtggatatggcaaaaaaaaaaaaaaggtggtgaaagtgaaggatttcaagatacagatcttggagaaattcaggagctaatagacacttcacaagatcataagaattaacagcggacaacttgttagagatgagctcttctgaactggtgccagaagatgaggaaagacatagaaggagcggtgccagaaaacagatttacattagattatctgacagaacggttccaattattcaagaccacttttgacttcttttaggacatggaaacttctgtgaaacaggcactgaaactaaagcaagaggtggaagaaaaattggtaccacatagaaacatttttgagagaaataaaaaagtgaaaaagacaaattgcaatgtgtttttgtgaagttacatggggtatgcctgcctctcctgcctcaccttccacctcctccacttcttccacttctgccacccttgagacagcaaagccgacccctcttctttctcctcttcctcaggccagtcaataggaagacaatgaaaatgaagagctttatgatgatccacttccccttaatgaatagtaaatagattttctcctctttatgatttccctaataatatttttttctctagcttactttattgtaagaatacaatgtataatacatataacacaaaatatgttttaaccaactgttcatgttatcagtaaggctttcggtcaagagtaggaaagtttttggaggtcagaagttatacatggagtttcaactgtgtgggggtgggaggttggcacctctaacccttgcattatatacaagggtcaactgtatgtagtttttaagtctgccagtcaatactatgttattcttagaaacttatatatgaaaaggaaacatggatacctacatggaaatgctgaaccctaaattcagtatcttaggtgctaggtttggggaatttgttatattttaacctgtattttcccctatgtcttaaatagcttatctaaaattcttttagaattgagctacctcttcctcaagggagcgctgagactctaacgggaaaactgaaagaggctttgcacatatttatcagaaaaaccacttgtggatggtctgtgtgccttttgacagttgccagagaattattgctttatttcttcttctccttgttaattctttgggcataaagggtaggatgccaggtgcatggacatgccaaataaagagagaaagtataggtgagactcctccactttccagccctttctgcccctttcagccactgaggtaggaaatatgaattgcaaatgcagaaggcactgccctctggcctagagaagagagggtagagggctaggtgcccagttaaagtgctgaacctaccacagcttacccagtgacctaagacaacttgaacaaagaaaatatggcattaagagtgtagcactttcctggattatcttttgccattgggtctggatagctcacatctctgagtctcactgttttcatctataagtggggacgttaggcctgatgatctttaagttctttgctgctctggaaatttatgagtctaacactcagaggccttaaatttcagtgaggaagacaagaaatgtaggcaaataatgagagtcaggatgacaaggcccagtgtccaatgagaggtttgaatattcttgggagattagaggagggagattcacttgtgcccgaggaaacaggaaaggtttctagaaagatgtgatgctaaattaatgttttctttttagagcagtaacatttgttcattatagaaaatttggaaatcacagaagattggggatagaggaaacatttatttcacgtatctatccatctattcatccatccattcatctgtccaaatatttgactacttattatatgccagctatgattctaggtaccaggaaatggcagaaaacaaatacacaaagttctttcttttgtacaattaatttttcaggctaaggtgggggaaataatacaagtaaacaatcatataagtaaataaacaaggtaattcctgcaagtgccaagagaataaaggagattgatatgatagtgaaatgatagttgggggaggggcgggagtttttactgagctcatggaatgcctctttgatgacacattattcccaaacccacaactgagagttagtcattgatatctgagaggtttctttactctgtgtatttccttttacaggtatgttctcacccaccgtcctccgctaaatccatgccttatgaagagactctctttcatagcctctacttcattattctttataactagaacctccccatgcattcttataacatttgcaatgagaaaacgttgtttccctaattttcaaagagatcaataaaaacaaattaaaatagaggattagaggtgtctttttgccacattatttttccaagaacaaaagatgcagtgatctcatcattatttctccagaggtctctaaccataatatacagccatttagtgcagcttaacatgacaataactcactgcttctctctctttactctgaaaaaaacaggtagatgaaagggtcgagatgattgagaaaagcccctatcttcatatttaaaatatactataagttgtatgggcttatcagtccattttagggtaagacttttctggaagacaacaggagaggatgggcaatgtgattgagtatgtgtacctccactgaagatggggaggttaaatggaggggtatgaagaggaagaaatgagctgggccaaatgctgcctttaggaatgtgttgagcagcttggggagagaaaaagaggatgctgggcttcagagtccaagcaattgaaaggaacatttcaatcaaataagaaagacagaagacttctttctgaagtcccaggggtcaaccaaaaaacttttggatggatgtggttaagaaggcacaccacttcttccctctgacagctgttgtggggctacgtgaaatgtcatctataaagtccccggttcagtgtggaagatcaaagtctagcattgtgattaggaccttaggccctggtgacctcaccaatgagttcttatcctaactgagtactcactctaagccctcgtttcctcatctgtaacactaagttttcaacacctactttatagggtggctgtgaggatgaaataagatcactgacgtactgtgcttagtacagaacctagaacttacagaggaagagttcaataaatgttaacccagacaataataatgatgatgagtttcttagtcttaaaaaaaaacccctcaaagtcctccaaatttcctccttctacaaatgagtaaactgaggcatagaatacaatcattaaaaacatggacttagaacacaaatctgcacttaaatgccagctctgccattctggctgcatgccatggttaatttgcttctagactcttggattcctcatctgtaaaacaggaactttgtgacttgtaagtgtaagaggtaaatgtgacaccagcaaaatgcttagccaagtccctggcacatagtatttaaaactttacatgaggcagttaggtatttgcaaattatggttgtttttgtggttatcatttaaggtggatacaagttagcagccatactagggaatcaatctattgaagcagaacaatatcaagtagacaaaaaataactagagacattgaagatctgagaaatagaatgaataaactcaagcttattaacatattgacaaattagtgttaaataattttaatatatagaactccaaatgcaaacagagaaagtcattcttttgagcacactcaaaatcatcacaaaaatagaacatgtattaggccataaaagcagcccaattaaaaccaaataattcatataacacagagcatgttccccaactgttatgcaataaacttagaaattaataaccaaaggacagatttaaaaatctcatgaatttgacaactaaataacatgttactaaacaacactttggttacaaaggaaatcataaaggaatcctgaagtgaataataatgaaagcagaacaagtctatatttgcacaacaggctgaagcaacacttagaggaaagtctaaaagtttaaatttatttaacaggaaacaaaagttaaaaacaaatgacctgtatatacagatggcaaaaaaaaggaacatgaagaaaatgtttaacatgattagtcattaggaaaatgaaaattaaaaccacagtgaggaatcactacacacctatctgaatggctcatataaaaagtagtgatagcaccagattatagcgaggatgcaaagaaactggatctctcctacgttgctggtggaaatgtaaaatgatatagccgctctggaaggtactttgcctgtttattttataagtaaaaatgaacttactatatgatccagcaattatacgcttaggcatttattccagggaagcaaaaactcatgttcacacagaaacttatacatgaatgtccatagcagatttactcacaatcaccccaaactggaaactacctaaatgtccttaaatgagtgaatagttaaacaagctgtaaaacacctatagcatgatatactactcaggaataaaaagagcaaactattgtacctgtaacaccttggatgagcctcaagagaattatgctaagtgaaaaattatgctgagtcaaaatgttacatagtatattatttcttttatataacatttatgaaatgataaaaaaattatagatggagaacagattagtggctgcctggggttttagatggcagggaggagagaaagggtgtgtctataaaaagatagcataagtgtcttagtctattcctgctggtataacacaatatgttagaataggtgatttagaaataatagacattaatttctcatagatctggaagttgggaagcccaagatctggcaaatttggtgtgtgacgaggattcactctctgcttccaagatggcacgctgttgctttatcatccagggtggacaaacgctgtgtccttacatggcagacggacgggagaagaaaacttgccccctcaagccctgttctaaggcactgatcccatctttgaaggtggacccctaaaggctccacctcttgacacagtattcccccttgatccacagtttcacttttcttggttgcaattacagtcaaccacagtgtgaagatagtacatggaaaattccagaaataaacaattcataacttttaaaaatgtcacttttctgaatactgtgatgaaacctcatgccatcctgctccatcctgccagaatgtgcatcatccatttgtccaacatatccatgctatatatgctactcacttattagtcgcttagtagccctcttggttatcagactgaaaaatcagataagaatacaagaaaagaaaatacaggcccatttcatgcgtgaatgtatagaaaatacatcgtatgttaaatactaactaacgaagtcaacactgttttacaaaaataataattatatggggcttatcccaggagcaagttttttttcaatgttcgtgcaattcactactttaaatatgctaaagaataaaaatcatatgattatttcaatccttgagacaagcatttgatacatgaatgtccatagcagatttacttataattaccccaaacttgaaacaacttaaatgtccttaaatgagtgaataggtgataagcatttgataaaggtattcaccaatttatgattattttttaaaacccttagaaaataaagggaaacttttgttagattgctagtttataagccaaaattctacagcaaatattatacctaatgtagaaaatgcaggtgcattcctttttggagcagggagaagagtggagccaccattgctatttaacataatgctggagtttctggcccaaactttaaggaaagaaaaagaaataagatgtatgaggattgcaaagaaataaaactcattgtttgtagatgatatgataatccttttagaaaaatcaattgcaatcaaaaattgtggtaataagagagttcaacaaggttgccagatataagattaacttataaaaatcaatagcatgtctgtacaccagcaataatgaactagaaaatctaatttaagacaattgtaatacaaatgatcaaatatttaggatttaagtagtctaagaatatataaaatctcaatggagaaaactttaataagagagttaaaagaagacctgaatagatggagaaaaagtctatggccatggatgggaagatattacacaagtgaaaatcccccctgaatttatctatgaatttaattcagtgtcaataaaaatttctgttaagtttttaacgaacttgataaactttctctaataaatatatatagaggggaaaaatcatagtagtcaacttcaaggagggattaaaaacacagaagatgtacccttccatacatgaatctataaaatatactattaagccataactataaaaatgcatgctgtaataggcagtggatcaatagaacagaatggaaagctcaagaaccatttcatgtatgtctggaaacttcatgtgtgatagagatggctctacagatcaactggactgaatagtaagcaaatggttttgaggaaaactttttttactgtgcaggggaaaataaaactgaatgccaccttaatacctactcccagggtaatggactttggagacctaagatgtcagtgtgaatgataaagctacaaagttagaaaagaatattgcagaatgactttgtagactagagttgggcaaagatttcttcaaaaaaagtttgtgtctttcatagggaaaggaagagagggaaatcacagctgtggctcacccacacagcatttaacaacaacagatttgatatgcagttgtagcagtgtggctggaccttaaaagcataatgctgagtgaataaagtaagaaacagtgagacaacccaacaccatttatctaaattttaaaaatgcacatgtaataggatgcattttctaagaacacaaaataaatatattaaaatggttgctcatggtaggagagtggggaatgggataaaataaattaaaaaaaaaaaagtcaggataggctaggtatgctcgaggaacaaatgaccccaaaatctgatggcttaacccgcaacagaaatctctctctcgctagtgtgttgtgatcacataggtcaacaggggaaagtgaaatgggccaattacacttgggctttaaaacagtcctgaaagtgacaggtgatatcttctcacttatcactgggcaaggaaagtctcatggctatacctaacttcaaaggaaagtacaacctgaccatgtgcctggaacaagggggacgtggaatatttgagaacagatttcatgtctaccattagggagacatttcaaaaaaataacaacatgtatacatatgtaactaacctgcaggttgtgcacatgtaccctaaaacttaaagtataatttaaaaaaaggtaaaaagataaaaataaaataaaaccttgagaatcagcaaagaacacacacacacacacacacacacacacacacacacacacacacacacacaaacttggttgattttatttatttttcatatttctttctctctttctttttttttttttgagacagagttttgctcctgttgcccaggctggagtgcagctcactgcaacctccacctcctaggttcaagcaattctcctacctcagcctccagagtagctgggattacaggcatgcaccaccatgtccggctaattttgtatttttagtagagatggggcttttctcagttggtcaggctggtctcgaattcctgacctgaggtgatccacccgcctcggcctcccaaagtactgggattacaggcatgagccactgcgcctggcacttggttgattttattacatcaaaaataaaggactcttacttattagagattatcatgaacaaaaaaaacccctagaatatacaaagaattctacaaatgagtagatgattgtgcaaaggatttgaacaacgagtttataaagataaaaatccaaaaggctgaaaaatataggaagaaattctcaaactccttagtactgaaacaatataaattaaaatagtaatggtaaaaaatacgtagtgcccatcagattggtaaaaaggtagaaaaattggataataccaaaggttggatgaatgtgggttcacaggtacctttacatacagctaaaagttttggggctgctgttctgaaagcaatctgacagtactttgtcaaattaagtttacacacagcctatatgtcagtatttctgcccctaggaatgtagaccacaaaggaattcacacaaatctagaaggagacacctgagaaggtctactacagtgtgatttctgacagtgatgagtaagaagcaaacagtgtctgtcagtggggagcagattgataaatgatggagagaacacaccccagaaccccatgcaatggttgaaaatcatgaaataagggcacacagcagcctgggtggatgtcagaagtgtagtgctgagtgacaaaaaggtaaacgagctagaacacattccaatctacataattaaaaatacatgcatagtaaacaattacatgtattttacaagaactcattcgggcagaagacagtgtataaaacataatgggtctacagaaggaaggcagtgaaagtgaagagtgtcaataaacatacagaaataagcagagcaatctttgaggtttgtgttagtttcgtcttgccgctataacaattcaccataagcgtagcagttaacactgatttattgttctggaggtcagaagtctgagataggtctgcagggctgtgttccttccgtcgactctgggggagaatctgtttcttgccttttccagcttctagaggccacttctatgcctttgcttgctgttctttctccatccttgaagctgtcagcctaacatcatttctcctctctgccctcttgcctccctcttataaggacccttatgagtacatggggcccacccggataatccaggatcatatccccagttcaagatccttaatcacgttcacagtgttctttttgccatgtaagataacagattcccaggttctgggtattaggatgtgaacctctttgggggctgatatttttgcctactgtagagttttgatttggggcagaggatatcagggtgtgtgtgcagggatgtggtctgagacagcatttgggagttgaggacaggaagaactcatctgaccagtttggctggtagatgagaatgttcatattgagattgacaaagactgcaaatgccagggtggcttctccagatctctctattagacttctgcccttctctccaagagacacattccataatagttaaaatgaacatagaacaggaaactgcttaaatcttatggctttagcagaatcttctggctctccacacacctgactcaaagtcagactttcctccctcgggggatcaagcctgtactatgtgaaggagtgttggccggtcatgttaaccaaaacatacacatctattgatctgatagtttgagttatctttcagtaaatattcactcacctctgctactcccaccctttccaactgtgggacgagtggcttcattgatgttgagcttgcctgtgtgacttgctctctcaatatggtattagcaagcttgacatgagggaggccttaagagctcctacatgggttggcttggctcggctctggtgcattcatcatggaaagaacttactctgaggggctaccgctccttcaacctggtttgtagaataagcatacatcaggcagacctgggcacaactcatagcctggagccatgcctggctgatccacaccaggagattatacaagcagatgtatgagcttgagaataaatgtctgttgctgtaaacccgtggctttgggggtgatttgttatacagcactatggtgacaacatcccactaacaatgcatgcatataattttatttaaaccctacaagaaatgtaggaggtatgtataaatataaatctggggccaggaagggtaaaattattttttcaatgtcacacagttcataaataagttttaatgtgcaagagatagaaaatgtgaaaacatcaagtatctgagcaagactatttgcagatggaggaagatggaaagtggaaaaggcatcgagactgatgacatttaaggagagctctatattttgtagaggccatccttagaaggctaagtcaaaaatgaaagtcaaggaggaaaagtagctatcatttttgagattctgatatgaagaagtatcatttggtggcttatgtaaaagcctgtgctaggattgtgtctcacaatgtcatggccaagtgtcagcccctattagaggggtcagtcaggaaacagaccatgtgcattttaacccctcatcttttctgagaggtgctcaacaaggccagcaggtacttcgcaagtgagtgaggcaagcagtcagataatgtgtcttctagctactgttgtactgtgatccgtgttctactggggttccattcttgtttgccacaagttaactgagatggacagctttgttttgtcaattgcctttttcattgcctaggtaagtcccaaatgagattcgacagaaaataagcctccctcaactgacagtggttttcatttgaaagtgttccttcagtttaatgacactcttgtacatttcaaagaataaagctttggacatcataaaaaagcttggtaggcatttctggggctgctgacacagcagggctcttcaaggtccagcagtcctgagtagtgtctgtagattaatgtgattccttggaagatcaagaatgtcctgggatgggggagttgtcagctatgagcagcctcagctttgaaaaaccctggatctgaatatgaaaagccaaattctccagctgaaaaaaaaaggtagtacttctagaagggaggcgatcagagtccaattaggagatattacttttgtttgtttttacatagtctagaaacaatttgatttacacatggcttcttaggcagtaatggcaaattagctacgctgagacttttctaattccagtgccctattgttcacagccaggacaagtaaagtgttagaatgtttaatacctcaccagggcccagtgctaggtggcttttgaccatcagaaatgtttcaggttttattctttctccagcttttcttcttttcctttaatttctttaaatgaataaagcgacttgccatgaatcaagtgggaattgaagtgaaactaacccagatgttatgggtttgacttctccttttcttcaccccaaatcttttttcctttctctggaaactgaaaccacgtaatttcaaaattgcttctcttttcccaacccgatttcctctagcgcaaaagtaatttttaaacattccaaagtctctgtcttcaggctgcagtcttttgcctctgttcctttaattcttcccagcatttgagcacttgagcagttgatgtggcaggaggcacacagctgaccaccctgctccctggctcagccacagtccaggggactgcatctggatggggcagagagggaagatcaaggtctgagatggagctgggaagcagaatgtggcagctaggaggacatcagatttctgggcatgaggtgcctaggctgagtggaatactgggagacaaagatgggaacgtggaatattaaggaagtttaggcagtggggtcctgcatcagtcaaggtctattttggagataaatcatgacacttataacagacagaattgcctatacagaattgttaactatcctggttttcaaactgtgttgagacagtgtaagacaccactcttaactcacaagagcaccggtagtaccagtatcgtggaaaacacagcatcatctgtcagacacgctacaaatgactacttgaaggggcccagagtttcaacatgagattgggctacattccttctgatgtcatatcttggcagaattgggcttctggcaattgccatgatgaaatgcaagttttgtgccaaaatcaacatggaacaggcaacgaaagtggcagtgtctgtctaatctgaatcttcagtttgagaaattgtgtaatgctcaacagatacatgcatccttttagggagtaattgtagttaagaaagaaaaaaatagctttattttgatttgtgtgtactgttttctcaaaccacttcttatttgttaggacgcaaatacttattaagttgtttgcaacaactaatacatgaaactgttgggtatgttttttggcttaggatctgtgggaaaaaaaaattaccaaaacaccaagggcactgtgaacctctggttaactgtatataaagaattgcctagaaaatggaaaacattaaaagagaacatgaaaacactagacaaaggtggcaactgtggggagcagctactgccagggttgaaaagaacgaaaagaggctggtgctggtgtctctgaggtgctgcaatgaggctggctctgtaagtgttggggaaactgcaagctagatccaaatgctgtgacagaatgaactggctacttggatacctgatgctgaagtctccccgtcctcctgccccgcaggctccctctatcgccccctatgggcagatactagcatgcagccagacagtagagcacatgtgatttgtgccatcctagccttagcaccgtaaagcaagatacagagggcatgtttggagccaaagacaatggctgaataactggctgaaggcccttgggctgcagtttttgtgcttactgtgggcccgagggccatgacctcagtcaataggctgctttgtgaatctggattatatttgactctgggttccccctctgtaccccaaactgactggaggacctatgggatagggctgttggactagccctgattggacccaattttacattcatctgagtgggatggggtgggacacatacccaactgggcgagagaagcttttgagtgacagctttctcggaagaactaatgtttaaaggaaggcctaaagaacgagtggaggctggacacgatggctcatacctgtaatcccagttattttgggaggccaaggcgggtggatcacttgagttcaggagttcgagaccagcctggccaatgtggtgaaaccccatctctactaaaaatacaaaaattagtcgagcgtggtggcatgcctgtaatcccagctatttgggaggcagaggcaggcgaatcccttgaacctgggaagtggaagttgcagtgagccaagatcacgccactgaactccagcctgggtgacagagcgagactgtctcaaaaacaaagaagaatgagtgaaaactgggagagaagtgggaatagagagggaagagtgacacctttcagtccaaatgtcacctcttcagttgtcttctctgactactgtacatagcttgccatttttatccaatcgatcccttgtgtttccttcagaacactttttatttgcattatcatcatattataacatctatatttccttcaaaacacatgcaatttggttagctcatgtgtttggctgccatgatggttgttttagtctgtttttctcaccagatttagtgcaaaggaggcaggaattatgtctatttttgttaacactatgtcccccaaaactagcttgccaccctatagatgctcaaaaaatatttcgagctaagccgtgggaaaaaaagtaaaaacttcagggtaaatgaagaagaaagatcaggaaagatcaaggagctgatgccaaggcctcaaatcaaagaagtaaaattgtagacataagcctttcccaaccctccagtctctcttccctccttgatttttctccacagcacttactactatctgatgtgttacatacttttctgatttatctgatatattatttaatctcctacccccactagaatatatacaccataagggcacagagggtttttgcctgtttggttcactcctacatccagtatagttctcagcacatggtagaaactcaaaatacaaaacaaatgactctgtccagtgctttacttttggcaaagaatactcttaccatactgttacaactgccctagttgttatcctcattttcttcttagggatggtaggaggaccaatgtgtaacacccagactggcctagcacatcactatggggtgtgcatgtgtggtgaaaggcagggattcctgctcttgtggacggtccactcaagcatggcaatctctgtggccattagcctccttgctcttgtctcttagattttaaatgtgctgcctcctttatctctggcttaatcttcccgctcccttttctccctctctcgtccccttctatacacactcttcccctttacctggtttaatcctatccatcctttgcccaaggtccctttttcaggaaagaattcttggcctctagactaaatattacattgttggtaatttatctcaaatatttaagcttacacagtggggtgtgatgggtgagttgtattggtcaagctattgagagctagtaccggtattaagagccttacaatcaagaacacaccataagtacactagtgttgcagtcaagaacccatacctcagagaaaactctaagtacaccacatgcttttgatatcatatatcaaaataacatatgataaccatatatatacatgcgcgcgtgtgtgtgtgtgtgtgtgtgtgtgtgtttgtgtgtgtatggtttttttcttttagagacacggtcttgctcttgctctgtctcccaggctgaggcaggaggatcacttgaggccaggatttcgagacccgcttgggcaaatagtgagatacttgcctctaaaaaaaaaattaaaaaaaactaaccagatgtgatgagtacacgcctattttcccaactattctgataccatatcttgatcaacaacctccatgttgctaattagcaaactaaatattagcaattgattactgtggttgaaatcaagggcctgtggactagcataataaatgttagaagtaaattctaattggtgaaatgaaaggtatttaaactatgtgggttggccaaaatggttttaaaatactctccagaaggacattataaagaataatcctgtaagacctctagtcttcgaccttagggatggtgtcaaaaccttgattcctaaacagtactgtgttagccatgagattaggaggattgccggctgcctaaagtgacaatcatagtcatttattttacctccataacaagagtaagcatgctatagcctaaggttctagctttttgtaaataaacatttattgaaactcagccacacctattttgcgtacatgttgtctatggctacatttgcactataatagcagagatggaaagatgcaacagagactgtctaacctgcaaaggtgcaaaaccttaaatatttactatctggcccttaaaaaaaaaaaaaagctcacctacttctgccttagagtattgttgtacttgcctcgaatgaacctttcatgaaaaatggtaactgattcatctattgctgggactttatgaaatagattgtttgagctgttttgtgcccatttgctaataaatgcttgtatactgtgtccatctgtgtagtagaatttggcctaaggcttgcttttattatcatctaataatgcagttgttggggaatcgttaatcctcgttcaccttaaatttctttgatggctttggtttctatgataacgaatgtcagggttgtgcatgcgtcatcatcaaattggcttagctgggtttcaatgctgtactgtatctattgtccagaagcccagtacttcccctgcaaaagacttatcaagcttcatcatatcatccttcaaaattattgcatccccctagcatcagtttcacaaaggcaagcaagtgtcccattcacctacatccctaatgcctggcccatctcagaggttcaggatatgtatgtagaatggaaggagtagatacagcaataactgcaagggcattaatggaagctttctaacactaaactatagttggttaaaagaatgaggccagtagtcaactagactcagaaccaggtcagagatccacagaaacctccacaacccctgtttgtctcagtggctgttctgtctcacctcccactctgggtttgagggagtgcaactgtatttagtaccatccaaggctctggaatatattatcttcttaattcacctcatagccctaagagtgaaggagtatcatctacgtttcctacatgagaaaaataaggcacagacacaggtagggtaagtgatgtgcttaggttcaggtgatcacagaaccaatgttcttttccccatgtcatgatgcctccatgctcagtgagtagttttcaattaagaaatgagacaatgaacacgtgagtggattaccttctctgtggcattgctatgggagggtagcaaccgtgttgccttctcacaaggtgacatgctccagcttcaggtgattctaatcatcagcacgggtaggatctagtgcttctatattgtggaattaccagcatctccaaatggagctcctggattcctatgcttgcttatatttataagatatctatgataatacaggctgaatatcccttatctgaaatgattgaaccagaaatgtttcagattttggaagatttgtgttatacttaccagtcgaacatccctgttattgaaaatctgaaatttgaaatattcccatgtgcatttcctttgagcatcatgctggcactcagaaagtttcagattttggaatatttcagatttcagatttttggtttaggaatagtgaactagtattcaacaaattcttgtccaccaaacatctgcaataaattagaagaggtggtggaaaataagcaagagagtgggtttcgatgatgctggaaagaagatggattttatttttgttccccttacctttttattcccttcgtgtatcatttccatgcagaaagtgcaaattaatggtcacatcgaactatctgtcaacatatttctgctcttgcagtatcaaattatgttggcaataatgtttccagctgcctaggactccattgcaatttaatttgaaaagaactcaaattgcatctccaaatggataaaaaattaattttgcatacaagctatccacctccacattttcagccccatccccaaattatcttaatttaggttcaactttgaacagtacatatgctacaggcaactccacatgcaaacatgaatacgtagcaaattcatgaattgaaaatctgttttgctgcttcttttttaataagatgttctgccttgattaaggtcattagaagattctacagctattgcctttgacagcagggatggaggctgagtccatacagaacaaaaaagggagccaattctgacttaaccacatgattacccttaacaattggagtgtaaggagatcctgattcaaccctctacttattgcttttcccctgccctctattagcacctaaattcgggtggcttggtcttcagctatcactactttctagatttattcatttatgtacttattcattcatttattcagcagctgtatgttatagttataaaatgaggagatctaggggctcacaggttggcagtggaggtgaacatgaaccaaacatatgaacaataaccctgaagtctgataagagctatgggagacatatgatagcaggttaaggaaaaaaaatgtcatcgaggcattaattatgggcaagggagactgttagagaaagtcacaagtaaagggtggcattggagctgggccttgaaaatattgaatgaggatttgttggtggcatcccaagcagaggaaatagctgggcagaggcttggaggtgtgaaggcatttataatcccttgctttgctttaagaatacaggatttgataagtgagaagtggaaaatgactcaggggcatttgggggcaggaaggtacctgttgcagggtgggctcgggtattaggatgaaaatggtacttcaggatggacatggtgctttaataagagctgatgtagaaagaggagcagggttcagaggtgaggaggaccaccgtgccttcctgaggccacagtaagaatggagaaggttctgaaaacctgagtgggtcagtcacacatgcatgaacacaagcctgtccctaacatgtgcataatcacagaatctgagataggaataaaaatgtcagcccgtggccccttcccccttctcctttcacccaacaacatctctccccacaagggccccacatatgtgtgtgcacagcaacctcagtcctcaggtgcaagttctgtccactgcccccagacagccatcctttggccatccttaggccaacggccactcacaggaaggacagaacaaaggaagaaactgagtgtagggcctcgtggcagggaattctagggggtcataaatgtggagcctggaccagaagggagaggacagaaccagatcctttggccagcccattggcccccgatcccttgctccgagaagagggacagtctgaagtgggccaaagtggctctctaaagtacagggcataggacaaggccactgttgtctagcctaagagcatacagaaggtgcatccagaggtagagccactttgattttctatcagaggatggttttccagcttcccagacaagccacactcttcccactgtttgtcatcttcttggcctgtgggctattactcaagaaggtcatacggacagggctttatctggaggcagaaaccataggctctaggcttggctgtatttacacgggggatgtaaattcaacaaaccaatctccactgcacacacaaggctttcttagcaatttccaacttgtttgcaccaacccgaatgtaaaccccagattctccatgctgcaggcaattacccagcagaagctgggtttggcagatgaggtttagaggggtcggactgaaagcatgaatgcttccatcacactctaaaacctagtttccattgaataggatttcaggatattctcttgcttgaatgcaaaaaaaatatatatatatatattacccttaaagacctggctgacatgctgaaggggacagaacaaggactgtggagtcagagagtctgagctcagttcccaagaacaggtcaccatctgttcatctcacaggaactgccccttgacagaccctgtgccacgttgtgaggttactggcaaacagaacatggtctgttgcagcctgagaggggggacaaacacatgaacaagcaattcctgggcagtgtgacaaatgctaagtgtgtgttggacaacagtgcaaagtgccatggccaaagagtggatgtctgggggaagtggacagagcttgcacctgaggactgaggtcgctgcacacttatatgtgaggccccctgcaggaagagatgcagtttggtggaaggagaagggggaaggggctacagactaaaatgtgtattcttatcccagacccatctgtgattttgcacatgttcgggacaggcttgtgtgcatacatgtgtaactgacccattcatgggagcccagagaatgggggctcggccatgtggccctgggtaagttacatctcttcactgagtctcaacttcctataccgtcgagttgtttttaggacacaagtgctaagggtagctcctagcccagagttgctacttaatagccattgtctttccctttcctgaatgcgagttctcagatttacaaaatgctttcacctgcaggtaccgaatctctaggttcaccagagtccttcttgcctttggaatacaaactgagatttccttgaatctctgaattttcatagccagtagaaaaatcatctccccaaaatcatctcccaagatttcagtaacacacatgagcacattttccaaggttcctttgcctctggtccctgtgttcccacgtggtatcttattaggcccaaggcatgccgacctcaaccctttctagaacccacaggagatccaggcacagcaaaggtctttgttgtattttgagggccttgctggagatctaaaaatcacctggggagtgatcatattgggcttcacccaatattctgccatttgttcaccctcacacctctcttatgctatccaagcccccagtgggtttattttttctcttccactggagtctcagcataagtgatactgaggccccaagaatgcagcttctaccccacacaagcttccaaaggcatttctccaagaaaggcaattctctctaaaaggagtacctactgttagccaaaggcaattttctctctctttacagttcattttatgctcattaacaaccttttgagactagtgtaataatttccactttatagatgaggagatggaggctcagcaatgaagtgcccttgcccaaggtcacccagatagtgagtgccagagtctcgcttcaagccacgctctagtcagcagcactgtacccggggcccgccgtgacagtcacacatgctcaagagggaacaagtggcttttcctgtatcccaactttcccggtctcaaagagtctctttgctgtgtggcaagatcacgatatccttgtcttctttaaaaagatgctcctgtttagtcctttaagaggagcagaaatgtgtgtatatgcacacctccagaggtgagctccagggagaatggagaccagggatcaaaaggccagcggtcagctttgcactaaatgtgtttacatcactgtaccactctctcccgcaggtcctaggctcctgagacccaagtcatttttgccttgtagtattttggctttctctcactattgtcttcaagtctccccagacttctgatgaaggcgacatgcctcatatttatgttctttccctggtctcagtctccggtggcgtcaaggtgctgagaaaacacaggttttctactctggcagacctcatatcttggctgtgcctctcactctgtggctttaggccaattattttgtctcaaagagctttggtttcctctaggacagagctagtgatgccttcctcccaggtagtgagattttcaacatagagagtgcaactgatagcttacagagagtttttactttgcacactacatgtggggtcaggcagacacaagttcaaaaccgcactttgtcacctgctggccttgctactctgtactaattcctgcacatttctggacctcaggttattcatctgtaatgtggggtgggccatccttccctcctagggtcataagatggttcagaagatagagcccagcacttgtggctacagttccatcagtggtgttttgtctttatagctttgtttgtgggttaaggccataataaagacctcaaaaattatatttaacatgagatatggtacattttaagatgttcaataacatgtggtcttagccttgggtttaaatgggtcttaagtgttcctcttctccctgcctcaggagggaggtgagagtgccatgtgggtgactgttgtattggggcttggcatcagtttggagggcaaacccaggggaggagtgtcgaagaggccctgagcaggggcagtggctctctgccaggagagttctggcacctggacaagtggacaggccccagctaggcaacgctgatggggatgctcggggcttcccaggcaagccatttattgctctctgtgtgcctgtacatctgctctcattgcagtcggtacaactgcgagatgtttagccagcagccgtaatcccaccaatcataatccccagctacagggaccacatttcaccttccattccacaataggccctcagcaacagcttgttcaatgtcacattctcagggtcacccatttgatttggggatgctggctctgctttgcccaaaggacctgtgagcatgaataattgggctgtaagagtgatcatgaattcctcagttgatcaggggccagggctgcccactatcctcaacaccctcactcctgcagccacgtgggcagctctgtgcgggcttgccaggttccctgacattcctgtgaactatgttccttggtaggacgccgacacaagttacaggatattttccccatagggacagatcaactagcaccaatagcatcccctctttcttattgctgcattggtgcagaggtagccttacccttaaatgctctgaggggattggagcaatgatggaaacctagtccatcattttgcataagggtgctcccagcactgccactcacaaggcattcaaggtagacacagcatgcggaacactattattattactattacatatatattattactattactgcaaaacaaacaacacaccccagttatcatacgtagagtgcttattaagtttgagttctaactgctttacaagcatctcatctaacttcctcttccccctgccatgaggttagctactattattatcatcattttacaaatgaattaaaaagtggatccaaagaggatacataattgggcaaagttctgtaggtatggggagaagtactgatttaatctccagcctgtgcctgactcctcccagataagaaagtctgacacaagaatttctgggtgtatctatcacatgagaagttatgtttctaacataacaaatgcctgacccaagagccaggcatggtggatggtgcctgcaatcccatcactttgggaagccaaggcaggaggatcacttgagcccaggagtttgagaccagcctgggcaacatagagagaccccatatgtgaaaaaataaaaataaaaaattagccaagcatggtgtaggcccacctacatgtgaggctgaggctagaggatcatgattgcttgagcctaggagtttgaggctgggatgaactctgattgtgccactgtacaccagcctaggatagagagtcagactcccatctcaaagaaacaaaacaagccaccccaaagacaaatgcctaaacctcaacataaaatgagctttacatgtgaggatttttgaaaaacatcatgtttattataacctgttttatattaaaaaaatctatttaatgtgcataaagtataaatagaatattcctaataaaattagacatagacaacattatgtatggtgatctgggaccaagatcaataggaggcatggagtgggagacagcattagggtgagaaggcatgctcagattagcttttagaatgatgttcccagagggaccaggggagaaaaagagggatggaagactgttgtaggaggttaggaaatgatgaactgtgtagtcaaggaaaggagaggaaatcctaaagcagggttaatgggtcatgatgaacgcatggataaactgggtgttgcgggttgaggctgtgactcagtttccagctagtgcatctggatgttgttggctgaagaggagaggctgacctccaaggggacaggctggggctgaattcagtataaggaggcaggtcagctctcagcagccgtctaaataagcgtatcccagaagcgaggagtgtgctgtgtgtggtaccaagaaggttttcagtggcactttgatgcacccttaagaatttaacaatttcacatttatttttatggttaacatttatttaagatgttttccttttatatatttatgttttctattagatgcatgtatttaaataagacaagggagattgatgtaaagaaaaatgttctctaaattatattgcctgtgtcaaaaatcatgatggcagtgattgaatggtggagatatgtttggaaaagctgtgttccctgttgtagcagaacatgtaccccagcttcccgatggtctcttcagaacccttgtttcttgcctgcatgttttgcagatccggtacatggcccacagaacgtggaaatcgtagacatcagagcccggcagctgaccctgcagtgggagcccttcggctacgcggtgacccgctgccatagctacaacctcaccgtgcagtaccagtatgtgttcaaccagcagcagtacgaggccgaggaggtcatccagacctcctcccactacaccctgcgaggcctgcgccccttcatgaccatccggctgcgactcttgctgtctaaccccgagggccgaatggagagcgaggagctggtggtgcagactgaggaagacggtgagcaagggaggagagcttacatgggaatggggatattgaatctattcacagggccatggcagtcagttatgaggcttttatttttcctacatttttaattccctcacacacacctttcttttcttaggccttcaatgaaggactatgtaaactgtgcattgcacaactccagggagtgctttcccatcacagtgacagttctgccatagacttgcactcagctttggcccttttgtacccccatccctcttcttgctttataccagtgtattagaccattcttgcattgctataaagaaatacctgtggccaggtgtggtgactcatgcctgtaatcctagcactttgggaggctgaggcaggtggattgcctatctcaggagtttgagaccagcctgggcaacatggtgaaaccctgtctctactaaaatacaaaagaaattaccaggcgtggcagcgtgtgcctgtagtcccagctactcaggaggctgaggctggagaattgcttgaacttgggaggcagaggttgcagtgagccgagatcgcaccattgcactccagcctgggcaacagagtgagattccatctctaccaaaaaaacaaaacaaaacaaaaaaaacaccggagactgggtaatttataaagactgggtaatttataaagaaaggaggtttaattggctcacagttctgcagctgtacagaaagcatagcactgacatagcttggcttctggggaggctgaggagcttttactcatggtggaagatgaagtaggagcaggaacactacgtggccaaagcaggcgcaaaagattggcggtgccacacacttaaccagatctccggggaattcactcactgtcgcgaagacagcaccaacccatgagggatccacttccatgatccaatcacacctccagcactgaagattacagttcaacatgagatttgggaggggacaaatacccaaactatatcaaccaccttctctgtccaaggtttgactgcactgatgcctccagaaagataaaacatgtatcacattgtttaaacatgttgaatttggaagtcagacaatgctgaattatgtaagaattaaaaacagaaaatagatataaaaagcttagcgtacacattggatccacccagaactgaatattcatctggctggatgacagtcatctcaagctcaaggtatctgaaattgaactaatctccaattctatactgactttcctgtattccttatctcaatgaactgcacctagtaactcaagatagagacctgaaagccagcctaggagcctccatgtctccctcccaaacccaccccaccttcatacccccatttctaatgggtatgcttcctgcagtttatcttcctcataacttgagactccaagaacctagagccactactgctagaacacataacttttcctgcctctctgtccttacccatgccatttctcctgcttggaatgacctgtcctccatgtttgcaaggaaacctctattgacctttcaagtctttgctcaaatgttacttcctccaggaagctttccttgattgccccagattgacttggatgtttcttcccaggctcaccgcagttaccttagtgatagcatagaattcgccagttccagggcttacctaagaaacacttccccatgaccatatttcagtttcccctccagccagcccaggctgcctcttgccttgtgggatggctttagatagttcctgagaatcagactcagatgaagattcgtgtgcatgtgactgattaagaaagttttcccaggggagactgggaggggagtgagggaagtgggacaaggaaggggagaaagccaaggtgcaacttttggccaagtccagcaaaaactggctgcaacctgagccttcagggaactgttcagggtgggccatgcatcacagatgtcctaagttaggcaaggaagctgccagccaacagttagggtctgggatggggaggagagattcagaggtaaaatttcagtaacttttgtctctctgcatgtgcaggtaaaggatagagtctcacaaaaattgtataaagaggtctgaaaggtctagccagagcactggcattgtcagctgcataaagaaaatacccggcttgactcagattagccttagaacttgaagacagagcctctactgtggcaattctgtttaggacatgttttctttttttcattttcattttcttctttctttgtgtgttcctgggattcagtaggatctagtactcttgtttcatctaagcgagttctaaatacttcagagttatgaccctgagtagaacccagattcacattctcagctgcaaaatctcatgagaagacaagggaaatagtgccagcctcttctcaccctgcccctaattctcacttccaccatgtcccatcctagatctggaagttttacacagtctactttgatgatccatccctcccttacacccttccagttcatcctcgtagccatcctctttgcagaccccacacactggtctttggggtcatccttggagtagactctgtaaaacttccagttctaggaagatttccctagatctgacttcattgtttcagaaatctgtagccccttcctccagcaggtagaattgtgcgctgtcagacaatgtacactctggagccaagcatgcctggacaagttgtttaacctcttagtgcctttgtttcctcatctgtaaaatggaattaattggccagacatggtggctcaccctgtaatcccagcactctgggaggctgaggagggcagatcatgaggtcaggagattgagaccatcccggctactgtggtgaaaccccatctctactaaaaatacaaaaaattagctgggcatggtggcacatgcctgtagtcccagctactcagaaggctgaggcaggagaatcgcttgaacctgggaggcggaggttgcagtgagccgagatcgcgccactgcactccagcctgggtgacagagcgagactctgtctcaaacaaaaaaggaataattaaagtacttatcttatagattctcgtgcacattaagtggcatggtatataaagaaattggactaatacccagcatgttataaggtactatatttgtggtgaatcacaggagaaaaaaaaaacaaaaaggtattcacaaaggagcatctatccccggcagttgagaaacttcccagctcccctaggaaacctcttcagagctgtagacatgtccagacatctagaaatctaactggttgtgggaaatacactgtagatgctcaaaaagtggcagtgtgcttggtgcctgatatgagaaacagagtcagggcaaaaggatggtttagtgactcatattcacagggaattcctggttgttagagagggagaagtcactgctgaaaatcagcatgaaaattcaggactcaggagatgaacaataaggttttcccaaggagcagctcagggcacctttttaaagattctttgcccaccttgagctgctctttgaggattacctccctgtgcctcagcaaaccccaagtccagctttaaggcgttccttaacttctctctttcttcttcctgtcaccaagaaaaaaaagcctttatcaaaacaacatgagagcaggaatgctttgaaattaaattttaattaaacatcattaataaagcatcaattcctgctctatggagatgtgtggacattatcattactaaaaacaccaacatacgagacatgattcctcagttctgtattctgaggctctgcctcaaaacccactggactgaaggagagtctcagtgtaggaccctgctgtatgccagggttaagttccattctttctaaagagagaggaagcaccacttctgttggctgggtaactcgttcacctcaaggacaagatgaggctagagcgtggctctagtagattaactgaaacccccctccgggagccagcaagcaacctttaggattgagttggctgaatggctgaattcatgctgctgtcatccgtgccacaaaattgtcttctggggaatttgcagaatttgtaatttcagcacctcagtgcatttgacggcctgcgaagaaatccagcactagagagcagctcatggctgctgagccccatggcttcatttgggtagcagctgttcataagaaactaaacagattctttatttttcccttttccacaaatgtctcagacaaaaccacagttcgcttgcaccttgaaagatgaaaaccatgttgatggttttgcttggcagctcactttgactgctatttattgagcacctacactgtgctaggcacggatagacatattatatacagtggctcctgtactcctttagcccaagattttattgtgaaaattttcaaagctagaaaaatcgaaagaatagtacaaaggagacttataaacctctcatctagattcaacatttgtaaacactttgctgcatttactcatgtgtgtgtatcttatatctacatgataggtgacatatgctatgtaaatatatttatgaatacatacaatattttaaccatttgaaagtaaagtgcagaaatcatgacagttgatttctaaaccaattagcatacaagacctaaaaataagaactttatgctacatacccacaatgctatttaacctctaataaattttgcattaattttaaaatcatgtaatatacagtttgtttacatttctaataatatttaacctgattctatgtgacagaaccagggttccgtatatctttggcaaaaccattatgttggcgatgtatatttctcattgtattttgtcaagaagttcataatgtcagggagtcccagtactgatgatgtcacatatggtcacttagataagacaagaactgcccggtccctccactgtaaatgtggcaccttttttcttttgtaaagtatccttggagtgaaactttgagatggaatgagtattgtattcccctaaagctttcactcaatggttttaacacgtcctgagagtcttcacctgaaccagttattacgttggtgcttacaaaagggtgatttaaacatctataattctccctacgcttactagttagccttcttctttagagaagagttgtttctctcttcatcttcctccctgtttttggtctccctgttgattcatagatcatttttgactccgtgtattgaaatcctctactgccattctctgtgatgctcaaattgcctcaaatatggccagtggcagtctcttcaagctgattcccaggtccttttgacatgttctcattagtcttccttgcttctggcacaacaaaaatattctagactattcttttaatgtccctgccccagacctgaggccaaccacttattagggatttgtggttgctttcaatggggagtggtattttggcactaagatatacatcttaggtgtgctcggtgatgcgttattgcctgtaggttctttcagtaggtagagctagggagtataatttatttttgttttaagtcatgagctcatactgattcaaattcaacacattttatacatatatcttccttctcctgcagtgagaaccctggtgctcaacatccacatagttttcatttcctgaaacacacataaaatagtttcagaattacaacaccaatccctctaaaaaacaataaagctattatactaagttaggttaaagatttcagtttttatctccttaggctgtataccactgagggtatgcagtgagaatactatgttcaaaagttcagttcttttctctgtatggttatattatcaatttgatacccagttatgttcatttgtttccatttaaaggtttgccttccacctatgctttttaattcaatttaattgtttttaatatgcaaaacagttgcatgtttcaaaagtaaaaactgtgtctcattactgggtatatacccaacagaatataaatcattctattataaagatacatgcatgtatatgttcattgcagcactgttcacaatagcaaagacatggagtcaacccaaatggccatcaatgatagactggataaagaaaatgtggtatttgcagccataaaaaggaatgagatcatgtcctttgcaggaacatggatggagctggaagtcattatcctcagcagactaacacaggaacagacaaccaaacactgcacgttctcacttgtaagtgggagctgaacaatgagaacacatggacacagggaggggaacagcacaccctggggcctgttgggggagtgtggggagggagagcatcaggataaatagttaatgcatatggggcttaatacctaggtgatgggttgataggtccagcaaactaccatggcatgcatttacctatgtaacaaacctgcagttcctgctcatgtatctcagaactttaaattaaattagaaataaaaacaccattaaaaaactacattaaaacgtatattccaaaaaatattaccgccattcctgtctcttttcactattccaatccacacttgaaaggtagctattttcattcctttctggttgatctttcttagagttctttttgcaaaaaaatatgtaatacttttcttcttcctacttcttatataaaaggtagcataattgatatactttgcatcttgtgtttttgttcactcagtatatcctagaaatcacttcatatcagttactacagaatttgctctttattttttatgacactatggtatttcattgtgttgatggaaatactgtaatttattcaaccaatatccagtggacacccaggttgtttccgttatttactatcataaataatactgtagcaaatagcattgtgcatatgttgtttggtacttgtggcaatgtatctttagggtaaattcttaaaagtgggattgcaagagtcacagagtaagtacatatgaagttttgttagctgttgagaggtactcttccatagaagttgtatgattttgtgttttcactagcagtgtagattcatttaatctgaacactaaatgtgaaggagcaaagagtgtttttttttctattttacaaataaggaaatgtagaatcccatataataattacatataatgtaattgattataattaataacttaatatataccataatattattgatatttaatacagttaatcacatacaaaacatatattatttcatttagcatcatactttttaaaaaactcatgtacttgaattgtaaggaagactgacatgcctcaggaatgagtacctttattaagtgtacatttctaatgagccaatgatcaggtttctcaggtcacagtaagctagaaggaggctgcatgttgctaaggatgagtacatctgtagtaacaagatgtggcatgtaaaaccgggaaaagggaaaagtgagagaaaaagcagaaaaagcaataacaacaaggcaataagtaaagcagtccagagtcatttagtgtaagagtgaaagctattcacaccttagtgagtcctgaaggcatcactgtattagagctcagtacatttgagatgtttaccaagatggtcttgagatattataaagggcaaagagaaatgcaattatgtttttcaagtgcacactatgaactaggcattgtgctgatactctccattcttacagtcaattcccaaatactttgatgtagatgctatcgatacagttgtgcagaagaggagtaaatagaattcaaaatcttacctgaagggcattccctgaccacccaatatataattctatacctggccaaaacctctaccgctgttctctgttttatttttctctacctcatgctgtatattgattactttattatctctctttgagggatataagcttaatgggaatagaaactttgttttgtgttgttcactctggtaatccatagtatgggctcgttgttgaatgaatagatggatgaataaatgaccattccacataaaagttcatgcccttttcgtgataccatagtgtcccatttatgggtattgtttgtgaagatgggggatatgtatgacgtcttttagctatattcaaagctaactcagacttgcttgcatctcttcccacctccaagttcagtagtaccacattcgttgcttcaaataaaccatggtggaaatatttacaccatggaagttggcaaagtttttgtttttatttttccctggagagcaggttgtgaaacatttagtagcatacaactgtatagttcaattaaaaggctatagttaattaagatgtaaagatttatctggaacaaatgtattttctccaacacgactaggaaatatgagactaaaattatctaaatctctcttattaagttagttccaagcctctgtataatgaatgaataaagaaatatggcaactgaagtggagagacaaaaaaatgacatagacaagtatcaagggaaactcctgttgaattgtacatggctatctgcttttatatatactaccttggtattcctcatatctacccccaaagttcaccattgttaaccccttttcagatgtagaaatggagataaagagaggagaggaggggaggggaggaaaggggagaggagaggagaaaacttcccttgataacactctgtcctcctttatgttgaaatgaaaatcttccttaaattaccacctgactttaaggcacaagaaaacatctggtttaattacagtgaatttacatgaacccactgacaagaagcacagttaaaattagcaattttagtgtgcttttttttaagagaatgaaattataaagtaattaacctttgttgtagaactctgtcaaaaggatggaaagttccatgctgttaaatagaagaagaaatgaaattgtggaaagggaaaatgtggattcattaaagaattacaaagaaaaaggaatggaaaagggatacagaattagaagataagacaaaaaaaggaattttttgccgagaagtctttttacaatgagagagagagagagacctagtttaatcaaaggaaagtaagtctatctccttgcaaaggacatcttgactatggaatggtaatgtggtgggtggaaagagcctcttacttggggtgagacatcctgattttgctgcttaaagatgcgatgacagccttttagccttctggacccacagacctaccaggtgatagaagaaaggggtgatttgggaaatgccttggaaatagaagagtttgagctatatccaggcttcatccactacttcactatgcaaccttggtttaaggactcgcattctgtacacttcagtgccccatctgtaaaatggctcgctacagaggctgtagcacatgaaagtctgtgtaaagcccttaacttactgtctgccaagagctttgctaagtagtgtgtggccaacatcagacatcatagagagctttttatttcagggtgttcaggaaaaaacaaaacaagagctctatccaaaatttccgtttgccctgggcaaaaggccacttttaaataacctctaacccctctgtaatctcattttaaacatttcactctgaccacatctcttctcttttcaatttattccctctagtattgtagctccaaaaattcagccccactaggacttgctaccttgttcattgccctcattcccttctctacccagcttaaattccttgactgatcattccagttacatccttgcataatcccccaacacctcagcctcattctcatttccagctattcacaaccctagctccatctgatttcctgcctgtgctaggtctttccttccgtagctgctgcacaccactgcgctaaccactctcacttggaagccagaagcaccactggagctggcttttaaagctgcctggcaatactgtctttccctggcccattcatccctctagtctcccagagaatatttctcctatcttcagactaacagcacatccacctgttctcacttccacagatgaccttgttacctaatagactgaggaactgaaaccattcaaagaaattccctccagctctcattgcccacatgttgcccacatatttgacctccccctcacctccttgtttctatggatgaaccatttgctttttaaataaaggccagttttgctacttaatgcagcaaatcccacttacttttttttttttaactcaatgtcattgctccagcaattgtcccctttccaccctacatcaaaatttccctttgtaactggatatatttctcaccctccacacaagctgtatttctcccatctttaaaaagattaaaaaaaaaacccagaaacacccagctctatcttctcctcaagctattccatcccctccttatgcatccattctttctatttgttcttgaatccattcaaccaaagtaactcagatccctgccattgcaccaaaacaattatttcaagatcacctatgaccttcaagtcaccaaatccaatagtcattactcagaaagtcagatcctcttacttaaccagttggcaatatctgacacagctggttgttaaatcctccttaaaacactttttgtactttgcttccaattcatcacacacttctagattttctccttctgcagtggcttctcctctttgtttttgttttaaagatagggtttcactgtgtctcccaggctggagggcagtgatatgatcagctcactgtatcctctgactcctgggctcaaacggccctcccacctcaccctctccagtagctaggacatgtgggataggcacatataggcatgtgcaagtgtgctcagctaatttatttgttttatttattttattttatttatttatttatttttgagacggagtttcactcttgttgcccaggctggagtgcaatggcacgatcttggctcaccgcaacctccgcctcccaggttcaagccattctcctgcttcagcctcctgagtagctgggattgcaggcatgtgccaccacacccggctaaatttgtatttttagtagggacagggtttctccgtgttggtcaggctggtatcgaactcccaacctcaggtgatccactggcctcggcctcccaaagtgctgggattataggcatgagccaccatgcccggcctatttatttttatttttactttttttgtagagacagagtctcattgtgttacccaaggtgatctcagactcccagcctcaagccgtcctcccacctcagcctctcaaaatgttgggattacagtttgctggttccttttaaacagcgtgtattagtccattttcatactgctataaagaactggttaaaactgtgtaatttataaaggaaagagctttaattgactcataaatcagcatggctgggaggcctcagaaaatttacaatcgtggcagaaggtgaaggggaagcaaggcactttcttcacaaggcggcaaaaaggagaatgaacgttggagaaactaccaaacacttataataacatcagatctcctgagaactcactcactatcatgaaaatggcataggagaaatggcccccatgaattaattacctccacctggtgtctcccttgacatgtagagattatggggattacaattcaagatgagattttgggtggggtcacagccaaaccatatcacatcccaaccttattggcccagttcttgggactctttcccattcgtatccataccagaggttggccaggtcttaaagtataggctttatccatgagagggtctgtagcagctactcgatgccaccattgtagcaggaaaacagccagggacaatggataaacaaatgggtgcggcagtgttccaatataattttatttacaaaaacaggcagctggttggattcaacccaagagccatagtttgctgaccctggatccacattcatttccctaattatttcttctagtctcccggctttaaaatccatccatatgttaataattttcccaattgatacctccaggccaggcctctgcccagccctccggagtcatttatccagctgtctcctcaacctctccacctagattgctaatcagcccgtggaattaaacacattcaaaactgagcctgtgatcctccttcaacttgttcttcccactgtcttctccatctcagtaaatggcaactctgttttattagtgtctcgagccaaaaaccttgacttctcacttttgtcagaactgaggccctggcttttacatctccaaagaaaatcccttctggctggggatggtggctcacccctgtaatcccagcactttgagaggccaaggcaggtgaattgctgggtgtggtggtgtgtacctatgatctcagctactcaggaggctgaagtgggaggactgcttgaggctgggaggtcaaggctgcagtgagccatgattgtaccactgcactccaggctgggtgacagagcaagaccctgtctcaaaaaaagaaaaagagaacctcttcaccctttattgcttttgattgagaccccctggctttgtacaaagcagcagtcttgctgttccccacatctgaaccaataacatattctcttggttcatcctgcaatgtatgtcaagaccttgaccatttctcacagcctctactactaccccttaggtccaaaccactgtgctctgcaccccagattattgcagcagcctctaaataatctttgcagcttcagctctggccgctgcattcttttctcaacacagcaccaaaatgatcttgttaaatcatgaagcaaatcatatcactccctctgctcccaaccctctgatggtttctcttgtcactcacattaaaaacccgaagtttcacggtagctcacatgctccaggtgaccagaattcccacttttgtttgcctctgtgtcatctcttgctacttgtgcctcactatgcaaattcagttatcattctcttcacatatatcagggacatccctgcctcagggcctttgcacttgccatcctttttggctacagtaaggttctgccaaataagcaggatggttccttcagcttcttcaagtcttttttccaatgtcacctctcagcaagctcttctcagaccattctattaaaaactggaagtctcctacagcacactctttgtccctctttccagctttgggtgtctccttagcaattatcatctgacatactgtatatttcactatatgttttattatctgtcttctcccactagaatgcattccacagagacaagattttttccttgtgtttttcttactctgcttcccaagcacttagaagaacagtgccaggtagacaaataaggacacaataaatacattattgaacgaatgaattctgagtcctcagagaaaaattagatttaagatcatttaccatagaaatcagaagaagatcgtagaaagctcagtaagctatgagaagatatagcttctatgattagcaatataacatcattcggatagagcagattgaggtaaggacatcacaggaaatagcaacaatcttaattgtctctacaaaaaaatcaaattagtgatctctaggctaccctagagctgttctcagagtgaatgcaatggggccagggggaggatcagacaaacatagtatttactttgtgccagacacctaggtaagcactttgtgtatattaacatatcaaatccccaggacaacctatgtagtaggtagtatttttatcctcattttaaagtaaggaaaatgagacacagagacattaagcagcttggccaaggtaatacagtggtgggaacaggacataaacccaggcagtgtggcttcaacccttgatcattgtttaattctacaatactgccttttaggtctcagtgatgacaataagacttttgattagaaatgccaatttgatcactcttcttaaactactgtcctaaagaaatatagagaaaaacacctttgtatctgcactgacaactgtaaaacgatgccatggctgctcctgaaagaattaatgcaagacgtcatgggagagggagtcccaaatgggaaagagatgactaggctgagactgcctggaaagaaaaccccttagggaattggaggagaagacttccaagtctacatgcataagtacctccaactttgaccaaccagtgctaaaaacaggagtgggcgttggagctggtggatgggagtggggaaaggagagaggtcagtgccctggtcatctttatttgctagtccatgatgcagagaacgagagctccccctccaagcctacgtccagggcatatggcaaacaagaaaaggggcttcagtggaaggatctcattgtaaagaaacaattacaggaaggggtagtgtctgtggtaactaacttcaggctgcccctcaaaacacctaaaaagccctcttgccacggagaatcttcctgctgcctaattatttcccttccttaactgcccctcataccactgccccacaggtcagacagaactcttatccagccaagtaatgtatgaatatatctaaattctttcctttccctgtgagttggaaatatttaaaataaggacttacatggtaactagcagaatgacccattaaaccagaccatcacacaccacttcttatgaggttgcatgcggaaaggttactggacagatttttaaaaatgctttcattcttattgtaaagaacaaatctgatagtgcaaagtaaataccccctaacaattgaagcaagaaacaagatttttaaaaacaaaacaaaaaaactaatacgcatgctcagtaagaatatctaaataaatcctgggatagaacatattcatggaatggaagttaagattgtaaaggtattagttctcccagactggcctttgtaaaagagtttagcactatttattattcttatttatttgatgataaactctattgtatttagggatatgtgcttaaggagtgaaaagtataaggaaaagcaaggtcacagtatgaagttcagtactgaaaaattaatgagatgattgttttatgcttttgtgtttatttcacagtaaccaagataaatgatgatagtgtatataatcttataccaataaatgtaaaatttaggtgatatggcaaactattaattaaaaaacttgacttaaggaaaagcaattctgtatagttttacaacaaataaagaaatagaatcagtaatttaaacttttgcaacaaagtacacatcagtcccaggtgacttcacaagtgcaatcagtcaaacactcaaggagtttgtaatcctaatcttacacactttatgagaaaggaaaaagaagaagcacttcccccttcaatttatgacaagactataaccttgatattaaaagcagaaaagcttatgagaaaaaaatgtatgcaaatacctaaacaaaatattagcaaatgatctgaaactgcataaatatgcaaaaaaatagtttaaaaaattagtgttagtctaactttagtaaatctgtttgtgtaatttgctacagtaacatactaggagaggggaaatacatatcatcactacagtagatacagaaaaagcatcagttaattctcagcatgatttaaaaaacaaaatattcttgtatgcctggaataaaaatgggccccctcaacctgataaagataactaaaaaacctacaaacatcatactcaaagatgaaacaatatcatcattatctttgaaattggagatagacatatcatcatttctattaaagactgtattggtggctatcattgaagataagaaaataaaagattggaaaagagcaaaactattattaactacagatgctacaattatctctacatagataacccaaagaaatctgcaaacaaattattagaattaatataagaatatagcatgtttgccaagacattaacattaaaaagtcaattccatttctattaacctaacaagtatgtggtattttcttaaagacattatgtacaatagcaataaaaatataaggtatttagtaatacatttaacataagttttcaagatgtacgtataaatctataaaacactgaaagacgttaaggaaggcctaaataaaagatataccatgttcatggatgagaaaactactattataaagacatgatattatctcccatttgatctataatacatgcaactaaaattcaaaaaccaaacattttttgaaaaggtacaagctagtcctcaaatgtttatgtaaagagaaaaggtaagagtacccaagacagtcatgaacatgaagtacaaagtagtagactttaccagatagcaagacttacacctcattgttaattaagatgtggtattgacacagggaaagtctaacagaaacaattgaatataatagaacatagaagtagacccatacatatgtggaaatgtgacagaagttaaaattatcaggcaaatcaactgaggaattaaaagtattttttcaatctccctaggatgaggagaaataattaaaattggattcctacctcatgttatacatagtaacacagttgtaaatgaattgaggacattttattaaaagagtaactcttaaatgtcaatgaaaatttagacaaatattctcatgacttcaggatagagaaagtgtttcttatgtaagaaaaactcttttgtgtgggtttattcagaagcagaccctgagataaggatacaaatggaagtagtttatttaggagatggtctcaggacacactcataagaaagagggaaagtgaaacaggaaagggaagaaagtcaatacaaagtttattaacaaaaaattaccatgtgaataactgagttctagaacagtgctattcccagtgtggtccaaggaccagcactgactcattgactctctaatccataacaagacaagtacagaaagagaaagtatttaaaaagaaggagcttagtatttttcttttttgctttttcaatttcacttttacttaaaaattatacttccctattaattcatttttattgtattttatgatatcatgagtccacaatggatttggaattatcattatcatcatcacaatggtttcagtgtttgaaatagtttgagaagtgctagtaaaacatgtctcagagtaacccaaccaagtagtaaggaaactgggatgttcatccatcaacttcctgtctttcattgcttgaaggatgtcttcggggcattaactctctggcacttcttgcttcttctacgtggagaacaagttggctcccacagcatttaggtaaatttgtactttgcagtaagcattattcagtgggatataggcaggccatcaacagtgtctgctactaaatttgtctctctctttctcccatacaaaaactaaaatctgatcaatttgagtacattaaaattaagaactgatccatattcaaaggtaacataaagagaaacacaagacacaaattaaaagaagtttttcagtagcacatatagccaataaaatgattagtatcaaacatatgcaacaggaaaaggacaataatatccaacaaacattaaaagatgctagtaaataggtaaaagcatgtaaaaccttaatgaagtattgttttacacttactagatggtctagaattttaaaacctgataataccaaatatttataaagatgcggaggagtaggaactttcagaacattgcttggggcagtgctgccaccactttggaaaacaatttggcattacactgtaaaaacaaagatagataagcccttcagtcataggaatagaccctctcttcctaagtgtaccttagtaaaatcttatatatatgttcaatcaaatatacaaaagtattccaataaattatattgtaagaaaccctacctggatacaactctactgttcatatacggtagaatggtggaataaataggaatatatttataagatggggatgaattagatacaactatgtgcatcaaaatagatgaatctgaaaatgatgagtgacaaacgcaaatcatataatagaaaacactcaatccacatagatttaaaagaaaccaagaaaaactaaatgatatattgtcttgggatatatgtatatatttagaactccgaataaaaatgaagagaatgattaagagtaaattcaggctgagcgcagtggctcacacctataatcccagcactttaggaggccaacacaggtgtatcacctgaggtcaagagttcaagaccagcctggccaacatagtgaaaccccatctcttctgaaaatacaaaaattagccgggtctcaaaaaaaaaaaaaaattagccgggcgtggtcatgggtgcctgtaatcccagctacttgggaggctgagacaggagaatcacttgaacctaggaggcggaggttgcattgagccaagatcacgctgttgccctccagtctgggtgacaagagtgaaactctgtcttaaaaaaaaaaaaagaaaagaaaaagaaaaaaaaggaaaatcaggatagtacctgtagtacctattttatttatttatttatttaacgatggagaaagaaaaaggagacaatagtgatgggcataaacagtgcttcaatagtatagtaatgttttatttcttagagcagatagtgggcacatgtgtatttaataattattctttgaactattcatacattattatgtatactttttaatatattgcaaaacactataaaagaaactttttaatacaatacaaaaacaatatgaacaataataaagtcctagaaatgcaatttgtaagaaataaaagaaaaacatttttaactgaggggcataaaaagaagcattaatacatgaagatttatacagtttactggataaaaggactcactttaaaagtgatactctctgcttcccaaaaaagagaaaaaaaatgcaactgcagtaaaaattgtgatgaaatatgtttgaaattttataaaactcttcctaaattcttctggaagaatacatgggtagtgatacctcaaaaagctttgcaaaagaagaataagacttgttctaccaagtatcaaaacatgtcattttaatgcgatagagaaatactgtcacagtaaaagctacaacttagtgaaatagaacagaaagccaaacaacatacactagaatataaaataatttaatatggtagtaagatggcatttgaaatcactggggcaagttttgactggtcaattaattgtcctttacaattgagaaaattgtaaggaattatagatttctaccatgtatggtatacacagtaatttcagaaatattaacgtgtaaggtgtaaaaagaaaaagatgggaataaaacagaaaataaataaattatagaacaactattcatctgtactttccattcatctgatctggtgtgagaaagagaattttccccagattggaaagaccaagatctattagcttgagtttcatgctcacagtcttcatcagacagacacttcttattgtccatcagacacaccctcctcaatttccgtcagatagaccctcaaatgaatgaatagaattttcatctctctattctgcttgccttctactctgtgattaaagcttctcctgtctttccaaattcttgatgtaattcgtcccccactacacttttggtagatggcttcaccccacttctcaagaaaacagagccattaggacacttcaattcctccgtacaaagcattagcacatttccatcctctcctcttctctcacaaaaggagagaacccttctttcaacccacccttgctcttgctttcaggaccctaccattgtaagttatctcctctttctttctcactcttcttcttacctctattctgaattttttttttttttgagatggagtctcagtctgtcactaggctggggtgcagtggcatggtctcggctcactgcaacctccacctcctgggttcaagcaattctcctgcctcagcctctcgagtagctggaactacaggtgcgcgccaccatacccagctaatttttgtatttttagtaaagacagggtttcaccatgttggccaggatggtctcaatctcttgatctcgtgatctgcccgccttggcctctcaaagtgctgggattataggcgtgggccaccaagcccagcctctattttgaatctttttcttagttgctttaatcataacctctcttgtctttaagagagtcattattttggctccatatctcattcttgttatggtttgaattcccctccttttcacagccagcattgtttacttgcctcacctcaccttcccctctcttctcaaccctcttcaggatggcttgtgatgccaacattctcccttaaattactcttgcttggctcacgagtcaccttgaggacagtaggttcaatgggcaagtttaaagccacatcttactcgactactcagccatatttgtgactgctgaccagtaccttcttgagcctctttccttctttggatgctacaatgacggcttaccttcctggttttctggttgcctctctgaacactgactcccagtttctccattcattttcctcctaattgttaattctggagttcttcttcacttagtcttagacctatttttttttctctgctctatactcttgccatctattccctgcctacggtttccatttccaaacattggccccagtcttcccatatccaactgctactcagcattgccacttggatgttctatgtatacctgaaataaagtatgacaaaaactgagctcaccagcttcctctccaaaattggtcatcctttaaggctccctctctataaacaacattttgatcccccagttgtgtaaaacaaaagggttgcagttctccatgacacatcccttccctccttcacccttatctatcaccaccaagtcattgatcttccatgttgccatcctctgagtccacatctgtacaatctatttcacttctacactaccatcattccagtccacgttacaattctttctcccgaggatgacaatgacagcctcctaactgatttttctccttccaccctcaacctcacaaagctgtccaccacactacagcacctcctccccattttgccctgataacttctacttatcaagcaactctaacttatgtgccatttaatatcctaacttgccattctaggttgttctctgcttttaataattctcctagtaccatatccctttatgtcagagtcctgattaaaaaaatgtaatgaattagttttgagtataatcgcttaatgtctgtctctctttccagaatacaagctttaccatggatttgactacatctctctttgttattggtatatctctagtgtccatcgctgtcccttcatcatattaaatacataataaatatttctggaaaggaagggtggataagggaaagcaataggatacctgactaattaaaagcttctgcatacctaagtgatttcaaaagccaacaaaaaaactggcgaaaatatatttgcaacctatgcaagaaagcttacgtccttaaaatgaaattacaatgacgagcccataagacaaagatgagcaaaaatgaagagccatacaggaaaatgagcacaaggtatagataatttgttcataaaagaagcaatgtgaatggctaattaggctgaaaacaaaatctgtactctccagtattctaaaaaagacacacatacacatgcacttaattttttaaatagtcagtgttggcaagaacagacatagtcttctgttggggagtccagaatggtacaaactttctgaaaggcaatctggtaatatatgtcaaaagccttaaaaataaaatagttcatttactttggcccagtaaattaatttccaaagcattaatcttaaggtctatctgcagagttgcatgcatacttacctataagcatgctcattccagcattgctcaaaatcatgaagaattcaaaccaactttaatgcccaataataaaggattagtgactataaaggggcaacgccccctctaagcagccattaaaatgcatggccccagagaaatgtatggccccagagaagcctgcaatttctttagtgataaaataaggtcacaatgaaatatgcacagtaggagttaacatttttttaaaaataaaaaatatatatatgcataggcatatctttttttaataaaattttatatgcataaaaagattggaaaataatatttgaacatgtgaattatgagtaattttgttcttttccttttttaacctttttatatattcttaatattcaacaaattctgtatagcatgtccataatgagcaaaactaaacatattttaatttaacaaaggggaactgattgcaacatatggccaaggctatatgtagagaggcgtagcgtgatgattaagagtatatgctttaaaactcacagacaggtgtttagttccctctttacaacttaagagccatatgaccttcagcaagttattccattttctcagcctcagttctcttatcgacgcaaaggagataatacctactgggcagaggtgttttatggcttaagtgaaataatgtaggtaaaattctagtccaagagtaagtgcttttataataccaaaatataaatagatttggcaacaatttactgaaattcattatttctaaggggttacagcagaaagtttggggaataatttgttttctggctcaccgtcttccagactgttgtaagaatagtgaaatccagcaggaggatgctggcaggaagactgaccggcttatagaaggagccccaggaaaggttgcacttattagttcaaaatgctggcgtaggtcattcattcacctattcatccaaccaacaaatagttattatgcatctacttcatgccaggcattgggactcaacaacaagtcaagctagctgccttcttggagcaaggcgagcttcttctaattggattggggtttcaagccacatagttcatgttggattcaggaattagtcaagaaactgatgaagcactcctaaagttagagaaaacttggcagagtgaagaaaatgatacttggtaagatgatgggaagctcactttgcatttctcaaatacaaatcctaaaacaagcttgtccaaccagcagcccctgggctgcatgcagcccaggatggctttgaatgtggcccaatacaaattcataaactttcttacaacgttatgagattttttttttgtaattttttttttttagctcatgaactatcgttcgtgttagtgtattttatgtgtggcctacaataataattcttcttccaatgtggcccagggaagccaaaagattagacacccctgaagcaaacacctcatttcagattcccacctctggcagaactggaaactgctcatgtcctttctgcccttatccggttcagttcataaaccgacttgctcagtctgcagatgaaaagcctgatcagccttctgaaaatgggttagcaaactatggcctgtgggtcaaatccagcccattgcctgttttcataaataaagttttattggaacgccaccgtactcattcatttatggattatctatagtcatttttgtgctaaaatgacagagttgagtagttgtaacagagaacgtacagcccatcagacctaaaatatttactatctggttctttacagcaactttgtcaacccctgttctaggtcagcggggctggagaaatgatgtggaaggtgacatcaagttcataacttttccattctgtagttccaggagctgttcctctagaatccatccaaggggggccctttgaggagaagatctacatccagtggaaacctcccaatgagaccaatggggtcatcacgctctacgaggtaaggaggtcccttgtgctgcatccattggcttagctttattcaagtcacttcagcctgacattggtgaatacccattctgctgaacgtataaaggtgagtaagatgagacataccaaaaggtttctgacagtacaatggggtgcaaacataatggcacacagtggagctgtcctggtagccccaagaacaaagaaatttgtacacatcatgcattgaagtgactatggtgacaactgacctcatccacaaaagagccaaaacccagggagtcagattgttcttatgtggaagagaaggcccaggcctggcaaacagtactgaaagttcgtctgggaaactgcaatacccacatgatgctcactttacgaatatcagtctctttgctttgaaaagaatcccaatgttattctctgcaccagggacacaggattcttcagatttaaattgctctgtgcccaaggcatattttgtcacccaggtgatggcatccaaagcccccattccaagcattagctgggccttaccatatcagagatgaaccagaacctactcaagcaggaatgtacccatcaagccaacacaatgtgccttccagaaaagttgcaaaaataagacaaactgtatgaaagtttattgcaaaacaaaacaaaaaaatctccaacagagctgatatagctaagattcaagtattgcaatacgagtaaggttgagtctcctcccaccccttgtattcttacacaacataagattacaatactagatcaagtggaaacacacaggaatgcagagggaagggcatggataccgaagctggaatgatgtagcctagtgtcctagtagctccaccttttcctgagttacctttggtagattcctcctctctttaagcctcatttttctcacctgtaaaataaaggtggtaatcacttcttcagggtttctctagggaatctgacgagggggaaagacacaagcatcccagactgaaacatgtaccacaggcccacgaagaggcttaagtcactgagagctcatgcagaaacatgcatgtatagggagtgggcttgggggaagaatattgctgccataaggaaaggtgagctctggggaggaaagtcaaggagtatttgatgaaggaaaagtactcaagattaatctaacagaccgataacctctctagagagtcacaggtggtcctgagaactctctgagggagaagattatccaacatgtacaaggtgcttaagaaaacaccttatctcactaaaactagcattcctcaggagagctaacatctccctcttagaagttgcagggagcttggcgcagctctcaggattaccagatggaaggaggaaacagacatccatccccatcacttatgagttttctcaggccacacgcttgggagaagctttcttcctggggagtaccccgagaggagggcaggtactcatactaatacaccttgcctagcacattttcaaaacttctttgggaaagagaggttcgaaaatttaactgaaacaaaatccagtcacttcaaatctacatgttctttgtaaagcagaaaccacaatctctctctctctctcacacacacacacacacacacacacacacacacacacacacatttacatgaaataaagatgtgttgtgcctggcaaacttttctttgtaaagcagaaggaaaggacccatgatttaggaagttaagttacttgatactgttatgtaaaagacgctgtgtgccagatgttcaagacttttggaattcacaggccagtagcatttaaaaaggcttgggggactaacctagggtacttcaacatcttttatttacatcgttttataaaagacataattccaaaaatatagaaaggatataatttcagaataaaagtccatccttcaaattgaataaatttatgattttttactaactcatgacagtcacattattttttctaattttgcactggattgatggcaactttgtcatggaaaagccctggtccttgtacatacctgcatttggaaactactactgtagggctatgttgcaggtggagtcatatctctgcacatattattccttgagagtaatatactttttcctctagtaggatgatgcattagattggatccttgagagtaatacactttttcctctagtagaatgatgcattagactggatgagaaatatcatgattaaaattccatgacaagaagaaagaaacagagggagagcaagggtctaaacacaactgtgagttagactctgtgtttgagtagaacctcctgcaattgaggcattattatatagtgcactctctgaagccccatgcacaaaggtgggtacagattagagcaggttgtccttctcacttctgtgtgaatctgatgccttgtggattttcagagaccagatgccagggatgttggcattcccatggattctatgggagacaactatgatgaaagacatcttcaggtagcttcttcgctgtgacttgggctataatttgcagagaaccggaaccagagtattgtaactggttgagttgtttgtaagcatttgaggctacttttgcggaatatgccaaaattattgagggatgctgtaaagacagctaaggaggttgtagatttaggccattgtattgtgagcataaacatgagtgtaatcttgtgtatcaaaagctagtgaggcctaagaaaataaggatggtgacatttgagcctatatagcctagatctgaatcccagctctgacatttacttgctctgtgaccttgagtacatcaagtggcctctcagaaccttaagtcttttatcagaaaaatcaaggtaataataaaatggccttataggattactctgaagatctgattaaattaggttttgtacagtgtttggcatttagaaataacattataaatgttagctgttatcattacataaaaatgaggaaattgagtgcagagggttaaaatgaaaagaccaagttcatattacccagatgccaaacccaggactcctaaatgcaggtacagatgtcttgcccctttctgcaacttagcgtggtccatagaccagcggcattagcatgacctgggagctagttagaaatgtagcagctcaggcctctccagtttaacaagatccttgggtgattcctatgggtattacggtttcagaagcactgttctggaaaatactactcttgagaaacttttggcaattgagagtatgttctcttgagtagagagatgagaagtaactgttactctgggctcaacccaatccagccccagacagtaagcaagagaccttgcttttaaaaacatttataacaaagcatgtgtttatgaggcaatttacaaatttaattagatgaaaccaatttgatttttaaaattaggttctagttgtaatttcaagagagaaattcataaattacaaattaccctcttttggcctcaaaatagaatattttattacaaagaaaaataggataatgcaaatggaagagaaattcaggattgtctgtggccttctatatacaaccttggcctcagcaaagttacaagcaaagaaaaaataagggaggggaaggagggaagtttcattactataactatgttattgttaaatacagcaggtccaagtggttcagattaaatttccttctgcacaagtccaagtcacagcctctgagtccatcctcagacaattctgccccccaaaatgtgagtggctttaagtcccattctgtctccagtcttcagtcctctgtttctaatatgaaggtgtcagactgttcttggcttcaactgggtaagaatgaaggggaaagtaaatctatgtcaaacccatgaaatcaaaaattctacctctttttggagttgtttaattcttgcctataagccagccaaagtctctgaaggtaaagtagtgaagatgaagacatatgaataaaaacagtgagtgcaaaggccctgaggtggaaatgacttaggcaagtcttaaaaatgtagtaaaaaggagaccggagtgactggggcctcctgagcacagaggacagtgatgagactgtgtgggggaaagggtgggtagggccagggatggcaggactcctagaacttgcattttatcctgaaaggaatggaaagccctaggagggttctacacagaggaatgaagggatccaatttatattcttaaaaggtcatccagctgttgtgtggataagagatggtgggcacacaagcatcctggaaacatctggaaaatgcaccaggaggcaaggacatttccatcatctatgatattaagatgaactatttattaaaagaccttatacctgagcagaagatgtgaaagtgttgttacagctgcctctttactgctgctagcccagctttgacaccctctttttagtaatgagttattatcttgatgagcaccctggagccatggacctttagatcctgggcccaccttccctgaaagatgggtgtctcaccctgaccctattaccactccagggctatgaaaccgtctcattctgcagcagcctcaaactctctctctgcccactgaaaggggagctcagaatcctcgtcagagcccactggttccggcctcatctgagctgcaacaggaagtattaagatgaattagaccatggcctcagatctttggggatttgcactttagtgggagatgcagaatgcaattctatgatcattcccctaacagagtgacagatcatgcacagatagaggcagcaccaacggccttgtgtccacaaactagcatcattaacatcacttgcaggcatgttagagatgcagaatcgcaggccccagcctggacccactgaatcacagtcttcttaacaagatccccagataattcatgtgtacattaaagcataaaaagcactggtttaagaaacattctcaaatctcacaattgtgatcagcacaagagggtggtagaggtggtaagggaatatcaactggtctggaaagctctgcctgatgaaaacattgcagtcattgcatgaataacgtgatcatttaatgcagtaaggaatattcctgctcacctgacgtctaaacaatatttacatcaggaatatggaaatcatgacatctgcatagactcttccagaaccctgcttttgggtttgattaaggcatcagggttccctaatcagggtgtggatgtgcagaagggtggtgtggcctctctcattctgactcagctcttgggaacaaccacaactcaccaagaacacagaccgtcgcaattgcggacaggcacttatagccagaatgaggtcaccaagggaagcaatccaaccaaacagttgtctaaaaacccttcaataaaatcattcagagacaagctgttcagagttcatggaaaacagtaatcaatatgtgtttcaattcaattaattgttctcgtcttcgtccaaaaataaaaatcacacagtgtgagggaattgggccagaagatgttacacttgcaactgggttaacgaagtgtgaaaatatttaaaattcagacatatgaagcctcccagtaagcctttctgtttagcagtcaaaatcaccaagtttctaattacagtgtataaatctgagaagcttaaagggaatgagaagaccctaatgaggcaggaatgggtgtcttgattatgctagagttgattggcatttatctcacaagctattctaggtgcctggcattcagagttaaataaaacagacttcgcttcaataaaacaaggcggcattcctgtatgggagcgcctttaaaaggtacaataggtcagagggtttgtcaatatttttttcagcacacagatggttggattcaatctgaacaaaaagcacgggccccaggaatcaacaagccatcagagtgcattacaaggaggctggagcgtcttccgagacaggagttctgaacagaacgaaagcctgaacacagacattgatggagagaggggaccagctgggtggataagctcacgaggaaactctttaagacagaggcccagagaaggttcctggctctgtctggatggatgagcatgcctcctcccatccctcagctttgctgcactgaccactcagggctcactgaccccagactggctcatgactctggtccacagaggagcagtgtggagaatgggatgtgttccagatgggcaggaggtagtctaggcaggaggaaatcagctggattgtgactaatacagcccaaagcaaaaatttgcataattcaaactggatctacgttaattaggacacatgatttgcataatgcaggccgctattgagtataactcgagccaggctggtaacaaggaaaaaagctcttgtttcctctaaattgttcaagccagaaatgagagcgtcatccgttgcccccagcagccacacagctaatccgccagaaagtttgattatttctcttgccaaaatagacacaggtcaggccgcatggcaccatctctgctgccacatcctgttctgagcacccctcagatgcttggagcatttcagttcctccctgcccacccccttccacacttcacctgttccatatgtccacactgcagccagacagaacatcttaagaggtaaatctgatcctgttcctcgtctgctttggcttcatcttaacttcgaggcactgaaggatctggcactggctgcctctctatcttcacctgccgctcctcttcccattgcttactgcagtccagctttagcctcctggcatttcccaagctcacccagttcctggcagccctcgccactctgtgtcattccttctgcctgtaatgctcttcactctacactcgtcagggctggctccttcctcttcttcacctccaagaggctttttccctccactgtccacttgatctaaaacaggttcccctctgtttcctctcttaacaacttgctttccttcataccatttccacaatctgcacttgtttcatttgtgtacttttgtatcacccaggcccgcaacagacttgaaccctcgtgagggtatgggtcctgtattggtgaattttatgtgtcaacttggctggaccacggtttgacagattggtggtcaaaccatagtttggatgattttgtgaaggtgtttttggatgagattgacatttacatgggcggacttcgagtaaagcagattgctccccataacataggggagcttcatcccatatgatgggcttcatcccatcagctgaaggtctgaatagatcagaagactgagctctcctgagtaagagggaattccccagccgatgcctttcagactggaactgcaacatcagctttccccggttctctagcctgacagcatttggtcttgacataactaatacaggccgggcatggtggctcacgcctgtaatcccagcactttgggaggccaaggcgggcggatcatgaggtcaggagatcgagaccatcctggctaacacggtgaaaccccgtctctactaaaagtacaaaaaattagctgggtgtggtggcgggcacctgtagtcccagctactcgggaggctgaggcaggagaatggcgtgaacctgggaggcggatcttgcagtgagccaagattgtgccacttcactccagcctgggcaacagagcgagactctgtctaaaaaaaaaaaaaaagaaagaaacaactaatatatgctatatttatttttgcctttcagtgtgtcctgaggacctaaaatagtagctttcacatagtatgtactcaataaatattctttggataaatgtatggatttgtgctctatcctagcaaggggcaatgatgattatttttgtctaactaatttagctgttctcaagcttggctgaagattagaatcacaccttgagataccttctgctcaattttgctgtgaagctaaaactgatctgaaaaaataaagtctagtttggcctggtgtggtggctcacacctgtaatcccagcactgtgggaggccgaggtgggtgaatcatgaggtcaagagattgagaccgtcctggccaacatggtgaagccccgtctctactaaaaatacaaaaattagctgcttgtggtggcgcatgcctgtagtcccagctacttgggaggctgaggcaggagaatcgcttgaactcaggagtcagaggttgcagtgagttgagatcatgccactgcactccagcctggcaacagagcgagactgtctcaaaaacaaaacaaaaataaacaaaaaatcctaccttgagagcttgaaacaatgtatagataaataaataggcgtctagttacctgaatgaatgcagggatggatggatgggccttattgcggtccaaataaatcagaatctctaggggagggggcgctatccatatgctgtatttgtttgttgtttttaagttccttgagaatttcttaaaaacatccagggttgggaagaagcattgcatgaattgaatccagtcggtctcctctgatatgtaatcctagctaaacaccttctaaataaacccagtcttgatcctggcttaacctatcttcactctcactctgccagactccacctctatctgatgttacgctacagccaactcactcatacacaggcagttgctaagtgttaatttttttaaggattaaattcaagaaacattggtcttttttccctcaaggttgctaaacagtgtgtggagtaattgaagaaacatagggaggtatcgttctgtcaatatccctttgcatgttactaatggcatcttgcaactctgatgccagagcccaccacagaccttcccttgcaaatctttttccctctcctgaatagtggaagtcagtcctgttgtggttttttttgtgagattaaaaaagacatgtgcacacacaaaacaatagatttgcccagaggccttccctaaatcttaaaagtcagggccctgggatgtctaggagccatttgttctagtccacagctcatcattcaacctccataagatgtttcccctccagaaacttgaaaaatgcaggcatccctggttagatgccatatacaggtcattcgggctgacagggaagctgacaggtgtttcagtagcaacagctctggttgaaaagaatgatttctggcactcagagtctggaaggaaaagaagttgcattctgatgtgagtgacttgcatttatgtacctggtcgcattagagctgctggtcatccacttgtggtatattaggattgcctctgtatttgccttggggtgtttcttcttttctattacgacacaggtatttgtgatggagccaggtaacttgacagtggaaatcaacagatgtgtagcacttgttacctaaggatagcaaaccatgttgtcctgccagtgaggttttcacagtaaacattaatcattcagttcagctgtggaaaacaataaaggttgctgcatgaaaaatattcctgcactgcgcacatgtgaataagtatgcttgtcttggggtgtgtgtatgagcatatgtttttgtgagtttatgtagttctacactgtcacatgtatacactcatataattgtatgtttggtggcatgtctgtgtgaagctttcatcctttgatgtatccatttttccagcttcatccttaggattgttctatttcattggagagttaactgacagagatatcagagacacagggctatgtctgttttctcctggactaggggggcctgtgatcacctcatatccgtgccatggtaacaccaggggagaaactttctttcatttcagtgggctcccagctgtttaacatgaacgtctgccataatttgtctccagagttttgctaaagaaaaatgttggattaaaacaaaagtctcccggttaaattgaatcctatgcatctacagttgtcctaggagagagaagggaaggaaatgaagagtgagttctgcatttgtcagggcgtgggctttcttcatgtttcttatctgggagggaaactgcattttgctgcactgcgtgtgcacccagaggcctttgtagggtgtccttctgtgcacatggccacatggctagagatggaactttctccctggctgctgtggtcctttcaataaactgtgcccagaggcagcacttaagttgtgaagtgtctctttaaacatcacaagttgttctcttttcatctcagatgttttaccgtgttacccctgttggaattccgcctaggctgggcaatgcagcatgaatttgctgcttttaactggctctttcgcttctgttttggtcagaacaaaatgaaaaatgtttgcatattttcatctatcatcaggacatttggagcctctgttctgaagtctctggaggctggaattccaatctgtgatttgttgcttgtcttttcattagctcgggagctagcaggtggtttttctcccctcaccttaagtcaatgggcattttttcttttgactgctttttcttactctttaccaagagaaaagtaattccttaaaactgacacccaagtatgagatcttggtctacctcattatggtttcaatacatacatacatacgtacatacatacatacataccatgtctccagggtccttcaagatggcctaaagaaagttcactgctttcttgttctgttttattttatgcacgtttttaacgtgtgtatcgctgcacgtcaaatagtgggttgtgcaaacagtaaatttaagattgacctttggttagtcattgcagagtgtacttgaactagttggcttctttcccaacctgggcctcagtttccacatttgtggcttaggaggcttggaccagggagattcaaaaagctctttctgctatgaactatcacttgggtgcccaaaatgagattaatctcactcctagtttcatgaaactgtttctgtattggtctgtgcatgggtctcttttctttttatttactcattaatttttcagtaacacaccaactaaaagacaaccagaatgctgacaacacctaacatttacttatgatctacataagcacatctgtttctactcacttacgtctccccatcccatcttcctgacccctccactcttctaaatcttgtatataattcctgtatattttatatagttttgctacttgtgtgaattccttataagcatattgttttttagtgttttaacttttaataaaggattttaagttgtgtataagcttttgggacatttttattccatattgtattgcaaatgttcatccccatggatgagtgcagctgtagtccattcatcttgactgctgtctactactccactgcacgaagatactacaaaactttcactcatgatcctttcataaacattggggttgctttcagaatgttgcctttatcagcagtgatgaaatgagcatccttgtgcctaccttctcctgtatatgtgcaagattttctcttgaatttctatctagaaactaggtcagatggtaaatgaatgttaagttttacaaaaatactccaaactctttcccaaactggttgcactaatttacactcatgccagcaaattatgagtgcctatgatttcaaaccctctccaacatttggtgttgtcaagattcttcattttgactaaataaatataaaatggtatcttgttgtcttgctttgtattccctctattattaatgaggtagaatattgtatttcattttctgtgggatatctgttcatgtcttttgcctacttttctactgggttatatgctcttttctttattgatatgtaatagttttataatatacttttgataatattttgccagttacaaatgtaatttgctgtttttacttcttctaaggtatctttgaaaaacaaaagtccttaattatagccaattttatcactttgtttatatagttaacacattttgtgtccttaagaaattcttccctaaaccaaggtgagaaagatgattgcctatatttctgctaaaagttgcatagttttgctcctgaaatttaagtttttgatctatctgcaattaatttttgcatagggtgagagatggagtgaaaattttatttttttattacattgataaacactttatccaagtcctttttacagtctctccttccctgctctaccaggccatatctgacttatgccaaaatttcttatatgcatgaatttttttctgagctctctattccactggcctccatgcactgtaaccatgcatagtcatatttattacagcttcacagtgtcctgatctctggtagagaagattcctcctcctcatacttgttcagcaatatcttggttattcttgcccttggctctttcattttagtatctacttatcaagtttaatgaaaacatctgttgtttttattagaattgccttgaatgtatagaacaatatgtgggtaattgacattttatgatattcaatctctgtatatttatttaggttttctttaatatctctcatagttttattaccttacttttagagctattgcatttcacataaaatccaaactgctaccttaggtctgaaagacttgcacctcccattctctttttccctctggtctcactggccttcttttactgtgctccagcatgctaggggcccctgtctcaggcttattgcacgcagagttcctattgccagaaagctctttcacttcctcttccatggccaactcattctcctactacaggtattgatgtgaatgctaccacctcagaagggccctgcctaatagccttcaggtagggctttgcccactcaccactgtctctaccattgcttcccatttttggataacatggaccacagttcacaattattttttatttctttataaatgtctagccttatattgtaagtgccaagggatacacacatttataaacaaagggactcacaatatagggatacacatgtacaagcaagtatgtgcatataaatacacacacacacactcctatatatatacatagctcatctctggaaagaactcagtaccttacctagtacctggaacacaatagggtctcaaatttggtggtgctttttttcttttctttttgttttcttttctttttaaaattttctcttttttttgttgtttttgttttttgttttttgttttttcctttgagatggattctcactctgtcacccaggctagagtgcagtgatgcaatctcaacttactgcaacctccacatcctaggttcaagagattcttatgcctcagcctcctgagtagctggaattacatgcacatgccaccatgcttggctattttttttttaatttttaatagagacggggtttcaccttgttggccaggctgatctcggactcctgacctcaagtgatccacatgcctcagcctcccaaagtgctgggattacaggcatgagccgcggtgcctggcctctttttttttttttttttcttatgaagatgggatgggcttttcttatgaagatgagatccctttgaaggcgtaggtagagtaacagaagtatctcttagcatccattagtccatatatatgaccttataggaccatccaaaatcataagattatgtcccaagtcttataataatctctaatagactatatgaggttccagtgaccagtgagtttatacttaactcatagaattaatttgctaaagtataaacttgttaaggttaaagatctgtattcacaggtatatccccggtgcctagaacagatcctggcacaaaatagggttcaataaatatttgtttaataaataaaaatgcattccaaacttgagtcaaggttaaggcaacaggcgtaagagatattcaaatatcgacatcgctatgatggcttgattttttaaataatttagttttcattaaatgttagtgacaatataacaatagtatatagtgttagaaaaatagggagtggaaataacacactagccatcttcatgtgggtttattttctttctagttcttgtgcatttgcaacagctttgacgtggttatggtgactttttttttttaattttcactatgcccaacatattctcatttctgtgtaatctatttattccatttaatggctctccattccctgaacatatggaccatatttactttcaaatcactttattcgggatgtgttgattgatcttactagaatgttagatataattttgggggtatgataagagtgaactggatctttttaagcagctggttaggagagtttgaatttctgctttccttttccctctcaatagatttttcagtagcaggcagtggcattcacatgcgttccattgattgtagaactgtggtctaaataatagctcactatgttcagtagacatggatctaatggaggagagtcaaacaatacatacacatttggatgggatccataaactcgaggttagaagtggtggtcctgttttcctccttgttttaaaacttgaatttcagtttgcttatttcctagcagagggagatgaatatagggcaagtgtgtgccctgactcctccctaataccattcccatgatggacatcaataatcaatcagggcatgctcttccactgcactccaacatggcctcagaatccctttcatcatggcacagcactgcagctggtcatttccaacagaatggggttagcctgcaaggtataccctgcctgctgtctctggcctcttctcagaaggttgatagggggataggtgaagctctgccctcactcattggttcatcctacagaatctgtctttatggtaattaggtaatttctggatttctttttttttctgcagtataagcatgttgcagtttccaatccttttcacaacagttgtaatcctagtggactgtgttgcagtatctgcagggacgtcagcattatgggccaacaagaagataaagcagatggtgtgaggttctggggaaacttcccacacactgtatcccccatcggcagctgggtttccatttgccagtagattaaagcaaagtccagacatgtccgtgtcagagtcccacccatctcatgactgaactcaacatggtgagtcaaaagtgttaacagaaaagccaaactttgcaaaatcttttaaaaaggtttattctgagccagtatgagtgatcatggcctgggaaaacagtctcaagagatcctgagaaagtgtgcccaagatagtcggattatagttttagggtggcaagatttacaggcaaagacataaatcagtgcatggaaggtatatattagtttggccccaaatgacgagatatcctgaagtgagggcttatatgttataggtggattcagagatttttaaatttgtaattggttaaaggagtaaggctctgtctaaaacttggaatcagcagaaaggaatgttttcagttaagataaagatgctatgtagctggattgatggcctgcagctgtgacttaacccttgctttgcatgactttaggccttgttcataatttggttttgtattgccacaaagagtctgttttaaaattaatgctggtcaattgtgcctaaaatccaaaagggagggaatgtagtaacgtgtgatttcctttcccccatggccaagaattccggttttcaggtttctctggggtccccttggccaagaaggcatccgttcagttggttgggagcttaggattttacgtttagtttacaaaagtaccaaagatattggaagtgaaaacaagcagtggtctcaggtctctgaggatcagcctagtgacagcaagaccctagcctgtgtgtggaggtgcagagaatgtgtcaagactcttgcaagcaggtttgattcagcagcctcccaggaagggctatgttaggcacactggtgccataggctcctgggtatcaagtcctaagtgaggcttagactgcgattatctaggaagacatggggaaggtgggaactgaggatggcttgggcgtctcccttctctcatagctgttttgtctcttaacaagatagagttagttctactctctcctcatcctatgagccatgcccctgaagactagcccttcactcccagcagcagccatgctgtcagttgcaatgcctaaaggccctgtgtgtccgttcccacctactgtataaatgttctatctgctgttgtgagaggcagttctttttgatgatgcttacctgtgttaccacttggataaagagaccagagctatagaagccttcctgaaaatgatgccagaggtgagagagtctatgttagagcaagtcatctagagagtcttcatgactgaagggcagaaccacaggaagataaggccaggtgcagaggtctcaagattttgtaggaaatcccgttaaggatcttgtatgtacaataggctctctgctctccccaccaacaaatgcattctgttatcttagcctttcttggccaatttttataacaatattatagaatgtttggatatcagagaaaaagatcacctataatctcttctaccacagtgctaattttgccttgtattttatctttgttaatatgcacacatcttttacctaactataattacataaaatttgctattgtaatttttcattaactgtttaatcacaatcatgatgcctttatagaaccatggaaatagttcatcttttttaatgatggcataattgtccattagtgtatataccgtaattttcttatccatccctttattttttatatatttgataacactatgataaacttcatgtttatggtggcattgcatcatggtggaaagaacatgaccttcagatctggttgacctggattcaaatcctagatctaacgttgcctaggtggctgacttttgggcaaattaacctctgaaattgaatgatcttattggtttaataaaattgtgtgtaggagaagcaatattaagcctacaattcaggaatattataagaattcaaaatgtattgtagtcctagctgtccagtatccattcaatgtcaaagttcgttttcttcctcctctgtttagagtatttgtgtattagacactcccacccccaccgcacacacgaacatgaaattactgggttgaatggaatgaatacttttgtaactcttgctacatattgccaaattgcactgcacatagatctcacctgtgtgagtgtgtgttttaagtattgtgttgagtttttatgccagtcatcatgtctgggaagaaggcctttggcagcccaccagagatttatgtcagctttcatgatactctcagagcaggctgatgtgtgaaaagcgtatcatgcatgttggcagatccatttgcactctccaaggacgtgctggagacactcttgcctcatcaattcctgttcactccctttcccctttgcccttcaatagcaagtagattgcctggtccccagtcatctcccagagggtcctggaagccccatgggaactctgaattgaaggactcgcagccaggtttctacagttcctgccaccaactttatgatacatcaccagccatgcccttccacagcctctgttagcctacctgcagaagaagaggttgaagcagttgggcctctcaagctgaacctctctgtgttcttctgttatcagcatcccctgggagctttttaggaaagtgctatctctgtccccaccccaggtcttctgagtcagggtctgcactgttacaagatccccaggttgtcactgtgcacgttgaagttcagcacgtacagtactgagttgtctgcaggccaagcattttccatcatgccaggaacatttactggagcctcagttttggaaccagtctttccctgaaccatgctcttgctacgtcaggatttcctcaccctgctgtgaaattcctccccttgcccagttatatctgtggaccgtggaccctggaccgtggaccgtggggaccttgctcatgggttagaatcagagaaaccaacacttccctccctgaagagaccaaaatcattttgctaaaatacagattatacagacactgtaccatttaaaatccttataaatcccaacagctctgaggataaaacctaacctcctctttaacttggccaacagtttcctccatgagtgactcagcccttgcgggcttgcccagttccctctcctgcttttccatccccactcccaaatgcacagactttacattacagccacactacactccccttgctatcttttccctcttcctcctttcttgcatcctcagcaccctgctcaagggttctttggggcatattttgaccctcggcacctggatgagggcttcctacttgttagtttataatagaatttattcccccatactgtgattgtggatttctacatctgtctacaacttggctcagaattcttagacttcctggcataggataggtcatccatgaatggcagtggtgctgctacctgcccttccttccttcatgtcttccctccacctttctctgcctgtgccctggcacaggagattgagtctcagacatcactgtgttaccttgccttctgttcatctgaaagagcgccttgcaggggatgaggagagagggaggagaccaagggaggggtgttgactgctgcagctttctcccctccagaaaggtcacagctcctcccaaggtgacctttcaggttctaggacctgctccctcctccacccctcccactctcgcttacttagttcactcctccacgatacctctgccccgattctctcaaccggctcacagggttgtaaatagtgcctttagtcaactctccttgaattatctgtctatttcctgctcgaatcccatggagaccccattatctttaccatgtatcactgagagtgcttatcatcatgcattttgtctcagcccttcaaggtaaggatcactatccccatttaatactgagccttagaagaaggaagttacttgcctgagatgacctgactactaaacaaaacctagattcctactaagtgtgaatacaaagcttgcccacttaactagttagccacagtgccttttccaaaggcactcaataaatgatggtgaaattaacctgaatttcccaatcatgatcaatccacttgattagggtggccataagcttgcagatgtagggtggggaggagtaaaggcgcagttttggaatgaagagggtgactgaggtctggatctagccttggcttggaatccatgtagtctacatggtgtcccccaagcttgaattgccaaatccttgaggaggggtgccctgtcagtattggatgaacaaggcttgtgtagggaaatgagtgggaaaaaacaaatgggatgagttgagtttcatgcccaccatggaggtgacttcatcgtcatgattgtatttgcaaattccattcaacctgaacattcctgcaactgagtagacatattcagagcccatgcttcccctcctgtgaagctgagtggcatgcttgacctgatggctttgggagggctctgacacaaataggcactgtctggtgtgtcaacatcaaaggaaaattgcaaaaggcaaattgggctaatatttttcattactggaaaaaagtttcccataccaagtcaattttgaaaaaagaatttcgtctcttacatctgcacagaaatgtcaaaatggacagggctgtctgtaaacaagaaccatggcagttcatgaagtttctcactttcaaattaataattatttaaaaagaaaaatgaaaagaaacctaacctgggccaccaggatgactgcttctataacctcaatgttgatgggtgaacccagtgactgtaagtggtagtatggtcaaggtagcatttctccaactgtaatctatggaaccctttggcatgaggtgtccacacatttatgcctgggggtggccatagtctgaatgttggtgtttccccaaaattcttatgataaaacctaattcccaatgtagtggttttcatgtgcgtccgtgtgaggagaccaccaaacaggctttgtgtgagcaacatggctgtttatttcacctgggtgcaggcgggctgagtcccaaaagagagtcagagaagggagataggggtggggccattttataggatttgggaaggtaatggaaaattacagtcaaagggggttgttctctcgtgggcaggagtggatctcacaaagtacattctcaaggctggggagaattacaaagaaccttcttaagggtgggggagattataaagtacattgatcagttagggtggggcaggaacaaatcacaatggtggaatgtcatcagttaaggctgtttttacttcttttgtggatcttcagttacttcaggccatctggatgtatacgtgcaagtcacaggggatgcgatggcctggcctgggctcagaggcctgacagtggtattaagaggtgggacctttgggagatgataaaatgcttggatgtttgggaggagtctgcccttattaatgggattagtgctcttatgaaagatgctggagggagcttgttcaccccttctgccacgttaagacacagctagaaggcgccatcgatgaagaacaaaacctcactagacactgaatctgcaggcaccttgatcgtggatttcccaacctcaattgtgagcaataaattgctgttgtttataagttacccagtctgtggtaatttgttatagcagcccaaactaagacagattttataagttttacaggtttgcaggctaacaagtttttaagtttgagaaacacttaaaaggatgaaagaccttccctttttgtgtattctttaactcccatggtacttcttaacctcagtaaagtattgccatgcagtaggtgccaaatagactgttacagaaagaaaagaatgggggagaagaggagggatggattttactttctaaatcaatggctttcaaatctgactgagctttcaaagctctggaggcttaaaagacaggcagatccaaattcttctaaaagctactgaatcagaaacttcaggggtggggccaggaaatatttataaatggagcccagaggagtctcttgtgccaccatgtttgacagctactgtggcaaatctgtctgcactgacctctgccctcctacctttgccctggttgggatctcaaattctcaggactcctgcatccatcacctgctggcttcccctggtcctttctccaagatccaccctccacatcagccatctgaccaacctgctgaaacaagagggttccctgaccccccttgcaggacacacaacaggggtgtgactcatccgttcagccactgtgcacattcaaaccccttacgggagggggagctcacagacaggcaggtgcaggagctcgggctagcacttttgggctctggccccacagcagcatccaggggtgggtgtctgcaactcccaaaacctcagtgggcatgctacagtgctcttttagctctgccatctgcagacggcttaagtgttaaccaattcagtgtcctcttagtacctgggttcttgtccagtgtccaggaagaatcagttcacacatggacttgaaggatggtaaatgtgggggtcttattgtatggtggaggtggctctcagcaggttggatggggaggtggaaaggggatggagtgggaagatgaccttcccctggattttggtcatccagcagccggtttcctctctgaacatccccagctgaactcctcttgatgtttggatgctccttctcttctctcctctgccatgccattctgttactcttcttctcttctgtttgtctgcttgtggagcccggggtttgggttttatatgggtacaggataggggagtgtggtgagccaaaaggccacatttgggcatgaaaagaggaatgcctgttcccatttagggctgtgggtttccaggcttgagggtgggggttttgccagggaaccctcttctacccagtatttccctgactcctatccgtatcactgtgaaacacacagacaactttcacgaaccatacagctctttaatccagcatttgggtacccctggactcctcatgacctctttagcttgctttctgatcatctgctttttccacctctatgttctggcagcaccaaactgcttattggcagccccttccagaagctgctctttacctttgtacttctttgcacattgataacgctgatttgccttcaaggcctccctctctcatccactggctgtttgctgggataatgtctgcttgcctcaatcatctcagtcattacctctcttttaccccagctttattgaagtgtacttgacaaataaaaattgtatctgtttagggtgtgcaacatatgtatacgttgtgaagtgattaccacaatcaatctaattaacatatccatctcctcacatagttatgatgttgttcatggtgagaggacttaaaataagctctcttagcaaatttcaagtatagaatacaatattatcaactatggtcaccatgctgtagattagatccccagaacttattcatcttgcataactgaacctttgcatccattgaccaagatctccccattttcttcaccccctagtttggaggacattatgatgagtgaaataagccaggtatggaaagacaaatattgcatgatttcacttacatttggaacttaaaaattcaaacttataagtcaccgagtagaatgggcattacctcttttcaaagagacttcatctcacctcctctaactggtttatgcacccccctcatgtaacattctggagtatttttgtcattgcaatgactgcattgcgttatagtaatctttgtgtgggtttgcttgtgtgcatctcacgctccaggcaaggattttgtcttgttcatcaatgtttcccagacatctagaagagtacctagcagagagtggatgcatactggatgtttgggtaatacagaacccatattactcataatacgtaactcacaaagaaagaattggcctttcttccccctcaacctgtcctattttagctgagcagtaaattccgtaatgtcaaagaaatatagaaaacaaaaagcatttcttgttttctttttccacacacttttgtcagccgtgtctatttgcttaaatccatctttttccacgcatacgtcagagagaggcaactctctttaacaggattcttactggaaccatctccctacataataccttaaaggcatcctagattccctcttgcgttcttgtcttgggaagaaagatgttgctaaggactgttttatatttgtgttctcatctgacaaaaagatgtgccatggctgctatggcaaagtctgtttcacagtgcccaggagcactgcaatttgctgtaatttcactgcacttggtgtggtctgggggctgctgcatccatcctcatagacagtgacttccaattacaccagctaattgtaccaaacttgagctgcttgtgtaaatgagtaaatcattcccaaattaggcacagggaagctcattttgcttgctgtttaaggcttttgaggcacagcgagccccctcagacaagtatccctcagtttgagagtgggaggcaggtggaaggtgtttactaccagctctggtgttctctgcccaaggctctggaatccactggtaggaaacttacagcccgacccatatgggtcctaggataacaatgcccttggagtaaccttgaaagctgcaatctgggctttaagtttctgtcagtaaattgggagtattttttgcacagagaaagtgcacctgtgacattggatttcagctggagacaaaaaggttttgttttttgaggtttggaaaacttgagtgtccaaagtcatgacaagaacaaaaatgttttaagggccaaaaaataaaaaataaaaaacctaaatgctttaaggttggtcccatcagcatctcaagagcatttggttcttttagcagatgccaaataaatagagatttactgggggctaagtcacagtttagcacaagctttaaatttgttttaaaaagttagttgtttatatttataaaatatagtaacagaaaacaaattatcagttactcagaatcttacttttgtttcatttttttctcctagtacctgtctatatacatatgaaatttttctgtaattattgcatctttattattttaaatgctttttcctcatgtaaaatgatacatagttacattgttagcattttaatggccacattctgtcccatcaagtgacactatcatgatttatttaactaccttatgtgacattcacatagcctctaacatttatccattatggaaaatcatagaggtttccatgaacatttttatgaacttgctttttcctgtcttgttaaattatttccttcaaataagtttccagaattatgattgtgatgtcaacagcacaaccccctgatgtttttctgggtttatgcttcccctagagtggtgcattgcatcaacccaagctctgatcaaaggggctggaaataaagaggcttcagctggaagaaggctgaggccagtgaggggcctgggcacaggatgaggccacaggctgagagagttggggccagactgagggtgtattagaagggttgtgggcaaagaatcacataaaaaagggaaatgcagtctaactgtgccactaaccctgggtgacgtgtcattccctggggcctgatacctagcctataagcagggagactaacaaggactctgtgaagtttgccacatggtggaaagggatactatgcaaaagtccctggcagagaaattgactcatttctgattcttttattagtctttctcttcctttttttttttttttttttttttttacttttaaggtcaggggtacaagtgaaggttttcatgggagctaattgtgtagattatttcatcccccaggtattcagcctagtacccattaattatttttcctgatcctctccctcctcccaccttccaccctctgaaaggccccagtgtgtgttgtgtccctctatgtgtccctgtgttttcatcgtttagctcccacttataagtgagaacatgtggtatttggttttctgtttctgtgttagcttgctaaggataatggcctccaccgccatctgtgttcctacaaagaacatgatctcattcctttttatggctgcattgtattccatggtgtatatgtatcacattttctttatccagcctatcattgatgggcatttaggttgattctgttggctattgtgaatagtgctacaatgaacatctacatgcgtgtgtctttataatagaatgttttatattgctttgggtatatacccagtaatgggattgctgggtcgaatggtatttctgtctttaggtctttgaagaatcaccacactgccttccacaatggctgaattaacttacactgccaccagcagtatataagtgttcctttttctccacatccttgctagcatctgtttattttttgactttttagtagtaaccattctgactggtgtcagatggtatctcatggtggttttgatttgcatttctctaacgatcagtgatgttgagcatgttttcatgtttgtttgccgcctgttgtcttcttttgaaaagtgtctgctcatattttttgcccacttttgtatgggttttttttctcttgtaaatttgcttcagtttcttatagatgctggatattagacctttgtcagatgcatagtttgaaaaagttttctcccattctgtaggttgtctttttagtctgttgatagtttattttgcagtgtagaagctctttagtttaattaaattccatttgtcaagttttgcttttgttgcaattgcttttggcatcttcataatgaaattttggcccatgcctatgtcctgaatggtattggttaggtcgtcatccagattttttatagttttggattttacatttaagtctgtaatccatcttgagttgatttttgtatatggtgtaaggaaaaggtttagtttcagtcttctgcatatggctagtcagttatcccagcaccatttattgaatagggaatccttttcacattgcttggtttttgtcaggtttgttgaagatcatgtagttgtaggtgtgtggtcttatatctgggttctctattctgttccattggtctctgtgtctgtttttgtaccagtaccatgctgttttggttactatagccctgtggtatagtttgaagttggatagtgcaatgcctccagctttgttctttttgctggattgtgttggctattcagggtttttagtggttccatataaattttaaaatattcttctctagtttcttgaggaatgtcaatggccttttaatagggatagcattgaacctataaattgctttgggtagtatggcaattttaatgatattgactcgtcttatccatgagcactgtctgctctcctcccccaaacacacacacacaccccgtcagcccatcaccctcatgtgctacctccacatgtccctgaaatcccacaactctgtcttcactcctaccaccttagtcgtgactgtcaacgtctcctggtttcttgtcctgactgtgataatctcctgcctgttgtccctttctccacacttttcccaaataaggtcacattcacagattccagatagatgtatcttttggagaccgccacccaacctgctgcacttggcaactcctttaaaaaagtgtgtgtgtgtgtgtgcatgcgtgtgtgtgtgtgcgtgcgtgcgtgtgtgtgtatgttagggggtcaggaacttgctggaaacaccacatgtcattacgttgagaagagaagtgcagactgcatctaatttttcagaaagatgggaggtaatcagactttactttttgagggtttatatgggatctacctgattccaaggagaattaaaagataaagaagaagcagttctggatcaaccaagaacagacacctgggctaatatgattcacctctgggtgagctatgcatgacttagggcaaggttggagcttttaaactcaaaagaggcagtggtgaaatcccctgtcaccaatcctaatcctttcctaaggttcagaagtgcactctgggttgcttcaactactgacaggggcttcttccatagctgcctcacttatccgcagcaattcccaaaccccactacagtgttctctgcaacacccccaaatgttgtgaggtcttggcgggggttggtcctagacccatgttggtaggggttggtttcagaattgcttaactactaacaatttattgggctcttcacactctggggacagacgaagacagaccagaatccccctcaaaaggtgggggctgtgaggactacatcagtggctcagacatcagtaaccaagtgagtatgtgctggacagcaaggtgagttgaatcccttgtgagaccagcgtaatgaggaaagaggaagagaacataacacaacatcaacagtgattagcctggcgtaaggagaagggaggcaaattattttccctttatgatttgtttgttttttctctctctctctccgggttttctaacaagcatgcattttgtttgcaatcagagcaaagaagcatttgtgtggggttgaggaagtggtgcacggccagaataagcaccggagctcagacatttatctgagtcaaaacgagttcagcattcctttttcatgataaccccaaactcagagattataggcattggacagtcgtattcaggccctcagataaatgtgtttacataatggttcactttttctcattgaaattgtgcctgttggtaaccaagtcacctgtcataactgatgacagacagacatagcaacccgatatgattttcccagggctgccataggaaagcatcacaaaccaggtggctttagacagcagacattcattctctcacagtctcagaggctggaattcagaaatcaaaatcgaggtgtcagcaggtccccaccccctccgaaggctgttggggaaaacctgtgccgtggctttttcacagcttctgctgttatgagcaatccttggcatcctgggcttgtggctgcattgctccagtctcgcttctgtctccacgtggcgttctcgctaggtgtgcgtctcttcagtgtctctcctctgctctttataaggacaccagtcatattggtctagggcccaccctaatgacctcatcttaacttgattatagatgcaaaaaccttattttcgaataaggtcacttcacaggtacagaaggtcttcaggtgatcctctactgtcaggacagaaattataggaggaagtaaccagaaccagggaggtagggaaggggctggaggagaggaaatcctaggagagggagaagaaaagagggcatgagggggataaaaggagtactcaaagctgccttaccccagcctcaagttccagcatccacagtgcttaacatctaaaccacatgccagaaagtactattgcctggaggggagtcttagagttgtgaggcaaagttctaagaaaaggaggtggttcaaagcagagacatgctaaaatagaggaagccatctgttcatgtttcccccaaaatctaaccttcccctgctgccctggtactgtaggcaccttgaagctcctccctcttcactctttgctaaagcaatgaacccctctttccctcatgctcgtgcaaattgtgtgcatgtgcaactgagcttgaactttattccagccctggtgagccaggctcaacctctgtcttggccacatattgggtgggatggacctatgtgtacagttggaacactgacactgaaagtcaggggcctcatgcatcagagggacacacaaaagtcgtcacagagaaaaccaggctcattgtagctgttacagtgtctcactattggcagcaccctgtggggggaaatcaacccattcattcatttgctagttcatttgttcagtgtttcttcaacactcattatatgctgggaactgttctatgcagttgggatacgctgatggaccaaacagacaaatctctctcctctgggagctgatgttttacttatagtgggaggcagcttgtatgaaatttgggaagtctttctcaaaggcaagaggagataggagattcatctttaatagcttcctcctccgccgggggagggtgtcctacagccaggacagcctctcctgtggtcaagactggggtatgtgctgcagcagggatttcccataacatgacccggcccctatggtcctggctgaataccctacccctctccagatctgagcggcagtacatacctgagagcctgggaacccatctttgtgtccaggtaatttgcgtctctctgttctgctctgatttggacattgattttgagtgcaagctattggtcatcttcctattgtctttcacatatcagccataaaccacacatttaatgattattggctagattaaatttttttccatgtagttgttaactatttatgtgttatttctgaaacattgttttctaactcatggtccttgctgtggaggcagagacctaagtaaggctgataatgtggtcagttttggagccctgagccagagtctaagctagactcatcattctcagttctgtcattttagactggcaccttttagtagaaacattatgtgagtcacatatgtaatttaaaattttctattagctgcatttaattaaaaaacaggtaaaattattttaataatgtatagttttagtaatatgtaatccaaaattgtatcatttgaccatgtaatttaatataaaaatatgaacaagatattttatactttttatactaagatttgaaatacagcgtgcattttccacttacagcatgtttcagtccagacgaatcatacttcaattgctcacttgacaaatttcagtttccttatttgcgtaatgaggggatacaaatacctgttgaatgtcactctgaggataaaatgagcttatgtgtgagaacttctggaacattgtaggggatcaaaaaatgtcgagcagcctgggaaacatatagagaccctttctctacaaaaacttttaaaacattagctgggtgcagtggctcatgcctgtcatctcaactcctcaggaggctgaggtgggaagatcacttgagcccaggagtttgaggttacaatgagctatgatcatgccactgtactccagcctgggtgagagagtgagactttgactctaaaaaatgaataaataaatagacaaataaatgtcaagccttcctcatcttcatattattcattcatcttgggcatgctagatacagtaaatgtttgcttcaaagtatgaatgaagttttaaaacagatattagcttgtccatttttttttatttcattatttttctctaactgttattttccttttattttctccctaaaaattccagggagattactctcctggaggattgaattttgtctcccccagcaaaatatatatttaagttctaacttaaaagaggagaaggaatataggggtagcctctttttgtgtttgcagggaaacaacgaaacaaggcatgttcaggaaatagggaggaatctccatgaagaacaacatatatatagggttgggggaagagaatggcaggaggctgcttgggtaaaatccaagaaagccaggtcataggaagggctgaggtgcggggttattttgtctgccattgtatcttatccagtgtttgcatttacctggaatctgccaagaggaatttcagcttcattcaaaaatgaatttgaatcattactcaaaaatccaagactccatactgtaaatggaggtgcccagttctctattaggacaaagtttgatagagcttctgtacagggccctttacttggagatgatagggcatcctttctccctctccagcttctatgcaccctgtgagaaactgtaggctttggtgccttttttgtttccatttttactatagcacaaacaccattataatagcatttctaagactctaaatggaagaagaaacacccacagtcccacagcccaacatatccacctgttttaagtccttgtccacatctaggaagaattttgtcctggttgttattatattgtagatacaatctgataacatactttcttccacttagcgttatgtcaaagaccttattttttccacattgcttgtcttaatcattatcttattcagtcactatgtaatattttatcaagttgatggaccctaatttacttacccaatcccctattattggacactgttactctaatacagataacacctttatctctttaaccaggagatcaaaagctgacaaagcagatacagccagagtcagccatgaattatgcatagggccaggttgcaaacaatttcttctatttaacttaggggcagcaaatagaaggccagtcggtccttggaggtagggagaaactgaactgtgaggtgaacgagtggattttcaaagataaatactggggtttgatgatgttgggaagtacagttttttcctgtggcggctgtaacacattatcacaaaccctatggcttcaaacagcagagatttattctcttacaattctggaggtcagaggtctaaaaccaaggtgtttgcgggcttgatttcttctgcaggctcagaaggataatttgttccatgcctttcttctagcttctggtaactgcagtgacccttggcttcccttgtgtcattgacacatcaccccagtctctgcctcagtcttcacatggccttctcctctgtgtgtctttcctcttctccatttataaggacacttgtcattggatttaaggcccaccctactccaggatgatctcatcttgaaatccttaacttaattacatcagcaaagagcctatttccaaataagatcacaattccaggttctgagcagatgtatcttttaggagtcaccattcaacccactacaggaagagaaagcatttagatttatgaacacagttctacattgcaagtttgtgctatatacatgttgcattctaacctctttactcaacaagataacattgtctttttgtatcaatatatagaggtctcttatgttcatttttcttagtcatgtggattaataatgtttcacccctataaataatgatggagatgaccatcctcatacagcatcactcccatgtacacactttgtccaagatagctaactagttgtgctaacaacttctttcctctacaaacttaaaataagaatttcatatatgtatgcaggtatgtatgctagcatgtattgactatttcctaaatgccaagtcctatgctagcatttttatagattatttcatgtaattatatcaaaaccatctgaggtcattactattattataatactattcttccccactaccatgcaggagaacaatgttttccagaaaggcagagcaactgggctagacgtggtggctcacacctataatcccagcactttgggaggtcaaggcaggactgtcgcttgaggctggaagttcaaaagcagcctgggcagtgtagtgaaaccccgtatctacaaacaaacaaacaaacaaacaaacaaacaaaaaagacaaaaagcccagctgagcttggtggcacatgcctgtagtcttagctgatttggaaggctgaggcaagaggatcacttgagcccaggagctcaaggttacagtgagccataattacaccactgcactccaccctgagcaacagagcaagacccttctctaaaatcagtgactaaatgaataaaagtaagcaacttgcctatggtcccatagcaagaagaggcaaaactgggatttgaacctaatgcccaaccattgccctaggctctactgctgccttttacttacatgttccttcagttctatttctggactctattctgtagtattttccgttgggctgttctgcacgattaccatacagtttcaccttctgtacttttccaatacattaccaatatttgatagatctatctcccgctatctttttcaaacactttctggatattctcacacacttatttttccagataagtgggagagaactgtaagttgcaatagaaatcctactggatttatattctatctgcattgaatttatagattaatttaggaagaattgatacctttacaatattgaatttattctgacttcataaaatctttcatatttctgagtagaatttcatagctttattcacataggtacttcagatttctagtttcacttgctcctagattattttttctgatgacttttatgtataggattcttcttgcattacatttttgaactgatcattacttcctttgcattttctgtttattgtacattgtgaagctactggcttttcatgttaattttataaccagctcccttagtaagatcttctatttattttctaatagtttttcagctgattcaccaaggctgacctgcaaataataactgtttttacctcctttttaaaaacaggcataccttttatttcagtctcttgtttaattgctttggcacttatatctggaatagaggacatccttgttttgttctgaatctaatagaaatgcttggattatttcaacattaaacagaaagcaaaatttggatatgagatacttttctcttttgtcattttaaaaagtagctgtttgtttccattttaccaagccttttatcatagatagagattgaatttcttaaaacccttgtcaatatctactgatattcatccatcaagtattggttgagtagtgctaggcattctgtagacagtaaacaaagtcttggccgggcacagtggctcatacctgtaatcctagcactttgggaagcggaggcgggctgatcacctgaggttaggagtttaagaccagcctggccaacaaggcaaaactccgtctatactaaaaatacaaaaattagccgggcatggtggctcctcgggaggatgaggcaagagaaccgcttgaacctgggaggcggaggttgcagtgagccaagattgcgccactgcactccaacctgggtgacagagcaagactctgtctcaaacaaaaaataaagtctctactctcgtggcgagtgatggttctgggctggtaggaaggtgacatatcaaagatagttcaagaaggctagttctctgtggaggtgttctttgagtgaggtttgaatgccttgtagggtgagccatgtgagatcttgggaaaggtataaaccagtaggatcagaaatgatcaggtgattttctgttggatctcttaatgtggtaatgcatgaatgcacattttctaatattgaaccatcttgcacagctgaaataaatctcattttatcataagatatggtattttattgagctgctcaagtaacaatatttaatttaaaatttttgcgtccatattcataagtaagattggcctgggggtttttaagcctaccttttgttaagttttgctatgggggtgagagtagctttaaaaaggaattcctaaattgtctttcactttttatgtcctagtaccatttcatggatataggaattacttttttcttaaaggaatgaaaatactctttcctaaaactgaatgtcctggtgctttggggagagtataggagaagcactcaaaccactgggatattcttgatattcttatgtgttttagttcattttacgattattgatttatttagcttttccatgtgttttcagtcaaatttgttcatttgtggtttcttggaaatccatccaggttttcaaataaaatggtggtagggttgggcaaaaatatcgtgccgtatcactctaatgtcatctttgtttctgcttgtttgcccaaataaataattttgtatgtgtttaagtttcaaaaaatattatctataataaaatgtaccatttctaggaggaaaattaaatgaattttgataaatgtatagttgtataaccactaccactattgaaataaaaaatattttcataatcccaaaaagtttccccatgcccctttaaaattaattcttccctgtgctcggccctgaaaaccagtgatctgctttctgtccctatagtttttctgtttctagaatgtgatgtaaatgatatcccacaggatgcagctttttgagtctgatttccttcatgaggcatcttgctgtcaaggtttagccacgctactgcatgtattagtactttacttcttatttgctgagtagtatttgattgtatgaatatatcacagttcatccattcatggatagaaatctgtgttgttcccagttttgtctactataggtaaaactgttatgaatatttgtgtacaagtctttgaatagacatacatttttatttctcttggataaatatccaggatttgattttctgggttatatgtaaagtataagtttataagaagctgcctaactgttttccaaagtggttgtaccattttgcactgtatcgaagagtcccagtcatttcatagccttgtgaggacttctcattgtctccctttcccctgctttggccacatgagtaggtgagtgtgtaagtgattagagctcatagtggttttaatttggatttccataatgactgatgctgttgggaatttttcatgtgctttttgtccttcacatatcttctttgatgacatctttgttcaaactgcttgcctatattttaagttgaactgtctttgtaccactgaacttcaaagttctttgtgtattctggatacaatcatttatcacatttgtgtgttttgtatatatttcctccctgtctgtgacatctctttttatctttttgacagtgccctttgaagagcaggagtttttaatttcaatgaatttcaactaatcaacctttctttgttttgtactttatgtcatatctcaaagttcttggcctaacaaaggtcacaaaatgtttcccctatgttatgttctgagttgattattatatatagtgcaaggtatgggtctaggttgatttcttacatatggatatctgtttaagcactgcttcctaaaagtactattctttctctgatactattttttttttgtagatatttggtagaattccccagtgaaactgttttcatatggatttttcttggtgaaatgcgttacctaattcttgagtgagatttggtagtttgtgtctttcaaataatttgtttatttcatctgtgctatcaaatttattggcattaagtgcttctaatatttatttttccttttaatatctcaaagatctgtagtaatgttcgtccttgtattctcgatgctaacgatttgtgtcttctttcttttctttctcgatcagtctggctagagacttgtcagttttattgatcttttcttttttcttttttttttttttttttttgagacagggtttagctcttgttggctaggctgtagtgcaatggtgcgatctcggctcactacaacctctgcctccctggttcaagtgattctcctgcctcagcctcctgagtagctgggattacaggcgcacaccaccatgcctggctaatttttgtattttcagtagagacagggtttcaccaagttggccaggctggtctcaaactcttggcctggctaattttcatattttcagtagagatggggtttcaccgtgttggccaggctggtcttaaactcttggcctcaagtgatctgcccgcctcggcctcccaaagtgctgggattacaagcatgagcctccatgcctggcgttcatcttttcagagaatcagcttttgattttaccatttgttttcattagttttctatattcaagttcactcatttctgttcttacctttagtatttccttctttctgcttcctttacatttattatgtacttctttttctagtttcttaatttagaagcttaaattatggatatgagaacttttctgttttctaatataagtattttactgccataaatttacctctaagtactactttagctgtatcccactgccacacatagtttgacatgatgcgttttagttttcaatcaattcaatgtgcattagcttttctagtgatttactctttgatccatggattaagaagtgttttgtataatttacaaatattggggaatttttcagatatctttctgttattaatttttagtttaaatctactatagtcagaaaacacatttcctgttattgaagttcttttaaatttgttaggatttgtttcatagtatggtatatggtctatctcggtgaatttgccaggggcacatgaaaagaatgtatatcttgctgttgttgaatggagtctgaaataacatcacttaggtcaagtggttgaagttttgctcagattttctctaattttaataattttccctctacttgttctatcaattactgggagaggaaagttttcaaatatagttgtggattttcatatttctctttccagttctcagttttgttttatgtatttttgttggtggtgtatttttgtttcgttttatgtaactgctgttaggtgcatttgtacatatttttatatttctatttttattgattttattagctgttggctcatctacattattatctagatggaaatatgtttgatttccaacaaattcaatctgaatatgtcttttaaacctactcctttgttacttttcttttattaattcctccttctgagtacctcagaatttcatggtatgcttttttcaccaatatttttgaattaaatgctttcaataatttattttcacccttcctatatgtaatgaaacaatgaaatatgcagttttggcagtattccctaagtttttgcatgaaacatcatagttaccgttgtttttcaaaatttctggaacaaaccgagattttgacttctttgaatcaaatttttattatatatttaaaattttcctttttttccaagtggtttgggttgtttgtttgttcttactttcatgatttctttttaaatttactgagttgtactcagagactgcagtctgctccatttctagaattaaacaagttttcttttaagccaagtagatagtatgacagcagctatagacattaagtaacaaaaatgtgttgctatattctaacaaaactttacaaagatagagcaaaggttgaatttggcccatggccatgccaaactctttcctgaagggaccaaccaaactctaatttgcatcatcttagttccgttatatttcctttaacattcttctaaaactacatcagaaacaaaatagagacacaatttatttcagactgctccacctttcaaatattttgccttccagcaacctattggcacttttataatgcaagacattgttgatatatcagtttgtataaataatacttttttttttttttgcgacagagtctcgttctgttgcccaggctggagtacagtggcacgatctcggctcactgcaacttccacctcccgggttcaagcaattattctgcctcagcctcctgagtagctgggactacaggcgcgagacaccatgcccggctaattttttgtatttttagtagagacagggtttcactgtattggccaggctggtctcgaactcctgacctcatgatccacccgcctcagcctcccaaagttctgggattacaggcatgagccactgtgcctggctacaaataataccttcaatttgacattattttggattttgttctaactttttttgattgcaatggtataactatttcaggataacaagcccacgtttaatagatctatcagtggtaaggtctgaatgtgttccttcaagtttcatatgttgaaatttcatcatcagtgtgatagtattaggaggtgagacccctaggaggtgattaagtcatgagggcagagccctcccatgtggggttagcgttcttatgagagagatactggggagctatcttccccttcacccatgtgattacccaataagaggcacatcttgcaagcgcagagcaacccttatcagacaccaatctgccactgtttatctaggacttatcagatgccagaactgtgagaaaataaatttctgttgtttataaattacccactctcaagtattttgttatagcagcagaaggcagaccgagatagttagataatctttttccttataatttcatttttgtattgcaagatggattggtctgttatcaggtttaattctctgttcacccatgtatagccaatatataattttatcctaataggaaaaaaaaaaaacacaggatagatttcacacaaaaggtccagtttcctatctaaaggttagttgttttgaagtgatcattcttcatatgccttgtagattccctgactgcatgccctaattttgttgccagcagaatacttactttttcttaattttatcaagaaaacatcaccttacatattaatctaatttctttaaataagatatacacagacacacatacacacacacgcacgggttttactgaattaaaattccatatttgtcacttactatatactcatataaaattgaatctcttctggtatttctgttttattctactaaattattatttctggaccaataatatacaattttatttactttattgtaagcttaataaagaaacatcgtggttcctcctacttttacagttttcttggttttcttagacatatactcttccatatacactttaaaatagtttggtagttaattttatgaattaaaattatgaagattctgagtgaaattgtatttcatcaacgtattggttttgggaagactgacatttataatattgagtttgctcattcatacatgtggtattttaaaaaatttgttcaggacatgtttttatatgtttcaataaaatttattagttgtttgcattttaatatctttttaagtttagaaccattcccatcaaatgtattttttccttgtctcatattatttaagtcacattatgattgggagtttcttctgatttttttattattgctcttgattttttatgtacttagatagattctagccaaattatcagctcctggataaattctagacattttttaagtagtcactcaagttttttaagtttagagtcacatcatttgtagataaattctattttgtctcttctttttaaaatatttttcctgagtatctcatttctttactaagtgcattggcttaaccaccaaaacaatgttaaatagaaatggagatggtaagcatacctgtcttgctcatgatattaaaggaaatggtttcagaattttgccccttaataaggggttcactgaagtttttttcaaaagtctttattatatttaagtactgcccatcaatttctgttttggttaaagttttcattaggaatgtctactggattttatcaaatgtatcctggcatatacatcaatgaaaacttcctctgtgacaaattccaggaaatcttaacccaaattgactccagtgaaaagtgaatgcattggcttttataactgaaaatgctcagaatgaggctggcttgagaccagcttgatacaagggttcaaactgtgttatcaggatcaggtaactcttacagactcttcccccgtggcccctcaatcagctgcaacaactgtaaaactcgtaagcatttagcttcaaatctagtggtagaggaagagatagggattcctagggctcccagaaaatattttattgcatctctctgattggtacgcccatagtcttacctctaaatcacaatcattaagaccagggaaatgtgatgtgctgattggctcaaatgtagatcacaagcttcacccctgagctgggtaggatctcatcccctctacatctgcttaaaggagatgagcaggtggattcccagaggaaagctttggtaacagtcaccagaagaagggaaaatagctactgggtggcacaataacagatgtcacttcactgtctattgattcaaccagatggcttttcccattaatttctgtttgtaatacattgtcttaatatatttgttgatgatgagccatgcttagaataatccttgcttagtcatggtttgtactttggatgcactgattgattccatttgtttaacattttccatctgtatttataggtaaaatttatctctagttttatttttgcattatttgtatcctgttttggcatgaaaattatgttggatatataaaatgaatggaaaagctttatttttatatggactgagataatttaaatattatcagagttatctttccttaaaggatatatttttaaaatcatttggaaaaaaaaggatctagacctgaggtggtttttataaaggtatttaaataactttcttaaactgttacgtgattttcttctcctcggttgaatttcattttatttactagaaaaattatcactctcgaaattctcaaatttcttattacagagttatacataatattttaaaatttaatatcttgtctatttatggttatatcacctttctcttttttaatatgttatactctcttattttcatttgcttcaccaaatgtaccatgttttttcaaaggacgacctttgattttatttagatacatgttttttctttatgtcattattattgtttacttcgctaaaaagaaaataatgtcattatttttagctcttatattcttctaattttattttgttattttgttcctttttttctaatttgtaatgttgaaatgcttggatcacattactctggatatatccctagctgcctccacgtgttttggcatgaaattgtctctttttcttgattatttttaaaatagtttataatttacatttggatctcctgtttgatctagggtctgtgtatttaagataaagtttttcagtttccaagaagttaaggctttctttttaattgaattatattatgattagaaatgtggcctgcaagttagaatggtgatcattaaaaagtcaggaaacaacaggcgctggagaggatgtggagaaataggaacacttttacactgttggtgggactgtaaactagttcaaccattgtggaagacagtgtggtgattcctcaaggatctagaactagaaataccatttgacccagccatcccattactgggtatatacccaaaggattataaatcatgctgctataaagacacatgcacacatatgtttattgcggcactattcacaatggcaaagacttggaaccaacccagatgtccatcaatgatagactggattaagaaaatgtggcacatatacaccatgaaatattatgtagccataaaaaatgatgagttcctgtcctttgtagggacatggatgaagctggaaaccatcattctcagcaaactgtcgcaaggacaaaaaaccaaacactgcatgttctcactcataggtgggaattgaacaatgagaacaggtggacccaggaaggggaacatcacacaccggggcctgttgtggggtggggaaattggggagggaaagcattaggagatatacataatgtaaatgaccagttaatgggtgcagcacaccaacatggcacatgtatacatatgtaacaaacctgcacgttatgcacatgtaccctagaacttaaagtataataaaaaaaaagaaaaaaaaaagaaatgtggcctgcgaaatcacttgtataacagaatgtatgatgatttctttttagccaaatgaacaatttgtatatataaatttacatatatttatatttatatctaaggacataaagactgtacattcataggacttcaagttcttttagtgcataatggtgctatatgatatgttatatatttgtgtgtgtgtatatatatatatatatatatatatatatatatatataaaattaattggccctctattcacatgcttacttttgtctcatttatctgtcatgacaaaaaattaatctcactactggaaaaaataaaatctcatacttcagttgtttttatccaattttgttttatatctttggcttttgtgttgtttatgactgttacgtttttcaagatgtctattcaattgggattttcaattgatattgggaatttcaattgacattttgaaaattataagacatagcagtcatatttagttccttacatttgaaattttcttgtaatttgtcaaatccatacaatgttagggttaggagaattcttatgtgcaatgtagactagcctcttgattttactaatggggaagctgaggccaagagagcagaatggccttgtctaaagtcatacagcttgaatttgatgaatctggcctctttccaccacatcacattctctaagtgccctgtagtcaaatttttctatttgatgctgtaagaatagatgatctggcacaggcaaaaaatggaaataatgaccagaaaaccataatttttgtttaagaatgatggttgaatgaatgttggagggtgtgtggaggtgagatctttactcagtcattcaagcacccaggctctttttatttggtgtcttcatcatcccctaaggcattcaagtcccctgcagggtctggatggctgaccagggaaaggagagtgatggattccacacaggatctcatgaatcaagcctagaagtggtatagtaacttccacctctttttcattggtgagaactcaaacatatgaccacagctacatgcaaagctttgtccaactgtgtgcccaggagaagaattagctttggtgaatatctagccagtctcaaccatatcttgttcttgggtgaacgggtctgaatttgaatgtggaagaagctcagctgagtccagggcttctgttgatctggagatcagaatgaagttctgagtttgaagaactggagcttttgttggaaatggggtcaaaatcccagagggcctagaggggtgaggaggtagactcccatagaatgaggagaaaagagcccagtatttttctaagtacaaaaggcagcaggataagccatcgagtagtgagaataggtcacctgtaccaaccaggcaggtttggatagggccagattagaaagtcagaaccatcactactgtgagcgaatgtggtggagaagaagagtggaggtgagaaagcagagacccacaggtccaagtccctgcacttttctacaggactttgtctacagatctggtcattgaagagggttttggtccctgttgcccaaggtattatgatgcttgcattttaaagggagcaattgaagactgaaagtcttcaaagcagaaagggattcatttatccaatattgaaatgtaaccatgaggtcagattttaaatcccacatactttaaaaagctcatccacacaacctgtcaccttgtcttcatatgtaggtagtagtagtaactatttgatgcacttgaggaaggtatctgtttatctgtgatatgcttaacagtacaagtccaacatagggttaaaaaaacacttgtgctcacaaagctagtcattgtggtatcatttataattgtgaagaaaaatctattggaatatgaacaaatagagaaatgtttaggtaaatgatggtatttgcataccatggaatattagagtcattaaaaatgttgataaggatgttcaataatcaaggatgcaagtttacgaaataatataagcaatatatgcaaaatgcaaaaatcgtatacctagaatgactgaaactatgtaaaaatgagtaggaaaaagaaaaggggggaggtaacacatgaaagtattaagatttcttgggtaatcagactaagactttttgttttcttttatgtattatctacattctctaccgtaagtattgcattgagaataattaaataatgattgccttcttaaaactgtgccatttttatatatgacagctgtatattttaacaattcacagaatcagatgttatagtggtccttgtaatacccacatgctcatgcatgaacatatacaagcacacgcatgtgtatacacacacacacacatgcacatacacatgcacacacacacccccccaaaccacagtccccctgagagagcaaaacacaaagcggcatgagtagcagcagatgttttcacaaatcctgcaagttcctccagattaaatgccttacaatccacaccaagcattattatcgctttttctttgttggaagccagactgttgagtcccctttcctcttgtgtgcccacaccaccgcctccctctctgtcttgtaaatgccgcatattattggatgtgggtcattgggtcagtctcaatgcctttcagaactggctcaatactgaagtctttagctgtcgctgacttttcctttttttttttttttttttttttttaactgcactatcctccctgagcaaacagggcatctttctgagaatgatcatataaatttctttgcatttttcacaaatgtgttggttgcatgctcgcctccagcctcttgggcccaattatctgaaaataggccctcatctgttttagcacaggcttggttggttacaaataacagaaacccactccacctggcttaatcaagaggacaatttgctggaaagatataaggctaacacaaatctcaagtcagggatgttttggggaaccaaaacccacaacagaaactgaggcagtggctggctctgagtctctgtccttctctccccatctcccacacctctgtgctctctctgcaaacttgcttcattcacttttctctattctctgctcccctccttcacctggcagaatgtgccattgtagaccacctaacagttcttagcctgattagaatcagagcgaaccaatttcaaattcccaccactaagggtctgattgtcccaggacaggacagatgtccaccagctgtgaccagtagggtagagagaaagctctggaaaaccaagacaccctgcttccccagcaaagcagcagttacaaaatatttaagataacatcttacaatgtaacactgtggcaatcagtttcaacggcttaggcttgttccagtgatctgtcttctccacttggctggtgatcgggctggcagtgacagagatgatgcctggggatttaacatcctttggttaagcctgtactgggcacatccattgcaacatgccatcctctctgctaaccccatttcctaaaggaggggattggggctcggagagaacaatgtctaagttcacattgggttcatcagctgcagagaaggtgtttgaatccacctccggctctctgttcacttgttcttcagtgctctatggctgcctttcgtgtgtgtgtatgtgtgtgtttcctgttctgcaaagtgctgattaaaaaataatgcttgtattttccttacagacattattactgtaaaataattaggtagaagcagtttgaaggctatggaatatgatataaatattattattatcattattaacactttttccactacctaactccgtaacccctgccaaggtttacgttaaacattgtcttgagttggcagaactttccttgcatattatcttgtcagggaatattcagaagagatggtggagagtgagggaaaagggggataaatcagtaagcttcggagacattaaacctgtaatgcgttaagatgtccatcccgatagagacttttttaaataaaggtttgtttatttatttatttatttatttatttatttattactgttttgacattttttagttactccaaattgaaatctgcgtcaacctatctgcttatcaaaactgtccctgctcctgtgttcctgtcctggttaaaaagtagacccaacacccccaagccagaaacctagggggtcctcggctccaccctcctcccgaaacccacatctggccactaaatcctccttccttccttccttcccagtatagcttcatctgttaaaaacccgatcccttatccctactgtagaattactcccacactgtttcactgtctttctttaactcgtcctcaaggttgctaccaactttccaagatgtgcatttgatcatgtcacactacctgctctaattccctccataactccattctctaaagcctgaggacttagtgtgaccaacaagacctttcctttctcttctttttcctgaacatgcaagcgtgcttggtattccctcaatacaccatgagcttccagttctcacctttgcaaagacaattcctcttgcagggatgttccttcatactctctctgccctgcacagtccaccttatccagcaagatgtggcttcttggtggtgtctttcctgacctactcagagacagatagttctgttgtcccctggactccccagtttcgcatatatctttgtttgcccttgctcacaaatgtagaagtcatttaaataccatctcctctctaggcttgaactcctcaagggaagaaattataacagactcatctccctaggacatagcataggacctagcaaaatatggcttcttaataaaaattatcaaaatagttgaatcaaccaatcaactgtgcttgtctagggtcatgcttgctatgaaaaaaaagtcatatggaagtcccatatgattttttaaatgatgtccctgaattagacactggaatagttttgccttaaaaatcaatgatcagttttactccacattgctgtctctttagtaaaaagaaaaaatgtaatctggcacgggtaatgcccatggctccgagttgggttaaagacaacatgaggcatctgagaaccatgtcaaacactgatgtgggcagtactgatgagtgcatttcaaagtggaccaggctgtgttttcttgtctgcctggaatgaacatctggactcaactgttaacattcagtccaatttgttgctaaggcaaccaagttacaggccaccctcaatttacaaaagatgatattgcaaaagtcatcttataagtcagatatttgaaagacacaatacattcttccgggtgaaaagtgatgtaaatggtggctagaatctagagaattgtatttaacccacattgttgtagtacttgtgcaagatgagtcagtaaatatatctcatgtctccaggtcacagcaatagtctcaaaacaatttggctgctaggaaaaaaggagcctctctccagtattcctcaaaatgagtctgagccctcaggatatcctgtgtttagtgcaaagatttcaaaaccaggttaagcatctggattacctgggagggatttaccaaaagagttattagtccaaccccaggcctatcccattgaaatcagaatcctctgtgggctctaggagtaagtgtatttttaaagctccccatcccaggtgattctggtgctatttctgaactgttatttagacttcttggtttgcactgccattttctcctcccctgccttggcactaagggtggcttctcatattgctgcccaagcttaaagctatggttacataggtgataaactctgagggtgccatagttcctaccgccgaaggatgacctttgtgatagataatctgttacaatgcataaagtgttatagtaatggttctcagtgaatcatacatccctatgcccatgcccatgcccctttgcaatgtgacattgccactcttctcagcaagaggcggagcctaagtctccagccccttaaatccacactgactgtgaatctttttgactaatagaaagtggtagaagtgatgatgtgcaagtctagaaatgaggttttcaaacgccttgactgactaggaatgtttgctcttgccctcccagtgtctggggccacctttctgtgaagaaactcagtctggtctcctggaaaatgagaaattaaatgaagagaatcagtgtcctaaccaacagtcaggaccaactgccagttgtatgagtgaggccatcttggaacatgcagcctcagctgagcttagatgactatggctacttgaatgacatcgagcagttctagcagaacagctcaggttgctaactcagaaaactataagaaataatcaattattgttgttttaagccactaaatgttggagtaccaatagatacctgattcagccctatgtttttttaaattaaaaaatacataaatttaaaatggaaaattattacacatagagtctctgtgaggaggtaattattgttattaaagatgacttccttccagaattttaatattcagatcaagacatatacaaagagattttgttcttgtcgatgcgccatttgaattctgatatacatgctattttgtagcctgcatatttcatgaaataatacactcatcattttcacatctcaaataatattttgcatcatttaatgacgatatagtactccatctttgagatgtacatactttatttaacctgctcctgtttttagataatttttggctgttatgctcaatgctgtaatgaaaatccttgcacataaatcttcccacatgtaaatgattattttgttaatacattatggctactgctgcttgatatttttgccaatagaatagaaaaaaacccataccattttaatttatttcattttattaaccattagtttaatcagatttgtacacatctattggttattccttttaatctattgttttattaaggaatgatcctctcatgtatgtatttttttttacaattttttttgtggaacagacacacataccttgaggtagtataccacagacaatagatcatcaaaccagatactacctctgctactttctagttatttaatacaaagtatgttaactacatttttcaagcctcagtttcctcaaatttacagtggagatactaggtgcctatttctttgaatagttatgattttgatgacataagaaattgcccaagaaaatgactggtacaaagtaagtgtctactgttagtggaaattaaaattagtccagccactgtggagagcagtttggagatttctcaaagaaccaagagttgaactaccatttgacccagcaatcccattactgggtatatactcaaaggaaaataaatcattctgccaaaaagacacctgtgatgtatgttcatcacagcactagtcacaatagcaaagacctggaatcaacccaggtgctcattaatggaggatcaaataaagcaatgtgttacatatacaccctggaatattatgcagacccgaaaaagaaatgaaatcatgtgctttgtcacaacatggatgcaactgaaagccgttaacttaaactaacacagaaacagaaaatgttctcacttataaatgggagctaaacattgagtacacatggacataaagatgggaacaaagacactgggaatttctagaggggaagggagaatggagggtggtagcaagggctgaaaaactacctattgggtactacactcactacctgggtgacagattcattggtatccaaccctcagcatcacgcagtatacctttgtaacaaactggcacatgtacccctgattccaaaataaaagttgacaaaaaaattacatatccagtaactattggctttcctagagatttgtttcacaaaaacaaaaaattgtttataacctgtgtgcattttaattaacgcaatattttcatttattcaccaaacacatgaatacgcatcgtaggtctagcatttttccaggcactgaaatgacagtgggaaaactgacaccatctcactggagcttatgttctagttgagtgcgacagatagtaaatgaatatatagtaaatcagacggcaataatgctgtcaggtaaaaaaaagcaggataatggggacagggtgtactggccacctgtgtgggagggacattttattttcaatgaaagacctggctttaaaggtggcatttgaacagagacctgagggaaggcaaatttctgtctggaggaaggctgttccaggcagtgagaacagaaagtgcaaagtgaccgggctcagtggctcacgcctatagtcccagcactttggggggccaaggtgggcagataaccatgaggtcaggagttccagcctggccaacatggtgaaaccccgtctctactaaaaatgcaaaaattagctgagcatggtgttgggtgcctgtaatcccagctactcgggaggctgaggcaggagaatcacttgaacccgggaggcagaggttgcagtgagctgggatcacaccactgcactatagcctaagcaacagagcaagactgcgtctcaaacaaaaaagaaagtgcaaagggcctcacgggagagactggttagcgtgttccaagccagtgtggttggaatagagtgagtaagggaaagagtggaagaaactaatttggctttttgtttaaatggatcatgttgtctgctctgctgacaacaagctaaaggaaggcaaggatagaagtagagaggctgctgagcaggcattttaataatgcaggtgagagatggtggaggctcagaccaaagtaggagggagtgatgagaagtagtagaattctagatgtagttttaagataaagccaatggaatttggtagcaaagtaggtttgggatgtgaaagaaagagaggaatcaaaaatgaccccaggtattttagactgagcaaatggaaggatggagttgctattaactgagataggaaagacactggaatgagcaggtttcagagaaagattgggatttaggtttggcatctgttaagtttcagatggattcctgttggatattttgggtgagatatcaagtagacagatatgccagtctggagttcaggggagaagtagaggacggagatgttagcaggggagtcagcctatgcacgagctttgcagacgtaaagctggaggaggtgaaagggtctcagtgtaggtagaatagggagattctagtgctaagctttgggacccttggatttttaaggtggaaaatttgaggcagaatcatcaaatgagacagaagtatcagccaatgaagtaagaagaaaaatgagggcagggtccaggaagccaagtaataaaaaaagaacaaaaggagaaggtgatccactgtgtcaaatgctgttggtagttcaggtaaaataaggactgagaattgaccattagatgcagcaacagagaggtcattggtgagttaacattagcaatttataaagaattgtgggtactgaaatctgattacacaggcccaagggagagcagcaggagaggaattgtatagaaagatacaaagaaggcagagacaggagacagtacctgaagatgttctctgatcaaaaggtggggagttgttggtattttataaaatttgagaaatattagaactaaagggaaatgatccaatggaaagggaaaaagccccaaagaggatggacactgctcttgggatgacgtttggtaaatgagagcacagggggtctcactcacacatagaagagttggtcttagatgcggcataggtccttctgctgtagaaaaaggagggaagacagaatgtatggggatgggtcagttaagctgacatgtgccgtgttctcaccatggaacttccattttctctatgaaacaggaagcagggttatcagctaagagtgaggagagcgtggaggtgttggaggtttgaagagactccataaagtaggaaacagtgtgggagtctgaaaatgagactgaaatggggaaatgtaaaggatcaccaggaaataccaagggagcacttgaggttagcagacaggagttacaacgagaccagttagcatgggtcactgctttcctcacacttgtccagcagactcggagtaggcagaaaatatgggcttcagcagagttaatactgtgacaaatgacttaaatgagcaagaggggcaagaacattttgaacatttctcaatatcaatgtatattacatttatatcaccttcattttaatggtttcagaggattctgtaaaatgggctcaatctatttagccagctccctcatcttgggtatttagttttttctagttgttcattattgcactgaacaaataatgattcaatgaattcccctttatgtcactctttgctcatagttttgattcttctgaaagtagtattgctaaacaaatagtaaaataatcagctctaagtaacaaagccaactcaaaatgacttataccatatggaaaatgtgtcacatcatataacaaggtatccaatcatatcctaagctgcggaattgcttaattcattattttaaaaacatcatgattgactcaggtttttctgctctgtcaaccccagtgtgtgggctttgtctttaggctggccgtcctcttggtcagaagatagctgccatgccctcagacatttcctgtggacctggggacatcccttcctaagaatctcttaagcaaatattcccagatgcacaatgtaaatttctgctcacgtttcattggcaagaatgaggtcccatgcccataggttaaccgatcactggtgaagaaaatagttatcatgattgactgagattcttcaatatttattctcgaggtggaataaaccttgagatgggataaagggggatctcctttgatgaatgcatagccacattaaagagtaaataccacgcaaatcagtgtttgccagaagtgaagaagagggccggggagagagatggatattacatagacaagtgtgtcttctgctaaggaagatacacattttcaccatttttgaaggcatatccatcaagtagtaaaattaaaaaaaaaaaaaaaagacctgtcacatcttcatagactttgtgcatttttaccttcctccttatttgttttggacaatcctgccttactgggcatcttgcaggttgtattcgggaatataggaagccgtagtcttccctgactcttccatgcaattctgttgatatctaccctctttactcacccaacgcttgcgaatacagtcagttctgatgtcatgtgacctatacattcctaaatatcgccacgatatgtaaaattgcacactaaaaattacagggcttataggaagaatgaagttaggatacaatatttaaaaactttatcagtgacccaaacaataggaacctaggaaaaatcttagctcagttttagacatgttaaatagctaaggaatacataaatactacaataaatatggtactttactttgaaagagatgcagtctgtgtgtaagtgggcatcagattccaacttgtgtgttattgagaaatggtgtatggaagatcgtctgaaatgggagggaaagttggaaccccagatgtggctgacacacactgtaatctgagtggggaagcagatgtttgaggtgtatgagtgcatacattttgtgtattccttcgtggttggttcatctgagtgcagttttctccagtcacctgcttttctctcctgtgaaatgaggcataatcaaacatttgtgttatgttcaaattattccctaatatacatgcatattttaaaaagggttacaatgaagatggatttactgacttcacaatcgatggggttcagaacatgctacccccaaatatggcaccttggcatttgggtagacagcagaagtaggaggatatctcaccttcccccagccttctcccctgaagaaagtcctaagacccttattccagaggtgcccttcctattcccagaggagaggaacgtccttatctctgaagacacagggggatggagaagaatcgttacaaaatagatcttgctaaattcccttcagtttatcaccattagacaatccccactttttccaattatattttggcacaactgtccactcttcatcaaatgtaagcattaaaaaaaatcagattttcctctttctttgggccttcttttctgaagacttccttgttgtgtaaaacatgtattaaatagatgcgtatgcttttctcttgttaatctgtcttttgttttaggtgcctcagccatgaacctagcaaccgatgaggaaagaaatcttttcttccctgcaccacccatgcccttttctgtccttttccatgtgaattccaccttctgaaagctgttcaaagtttcttgcatatggatgatactccctctgagttttcagggcccgggcaggcttttccaatccttatactgtgaagccataaatctctgaagataggggtagaactaagcagctgtgattatgttgcaatcttttctaggaaccaaagctagttctgcctgactctgtagctcctcacttcttcctatgccaagccaagtgaactgtaggtcattgcaaaatggcagttatttttttaaaaagaaagataaatatgtgggttaaggtaagaaaaatgaaatggatttttttttttgagaaataccaaaagaaagattagtaaagcaaacgcccttcagtagaggaaaatgtcagcctctattttcttatcaaaacctattattttacttttttcccatttttcctgatgtatgctaatagccctcttacctttcaggttcttagttgacttacagaatagagggaggaaacaaagacatttcatgcaaggtctgagaaaaggtagggcaggaaatgttcatatgtgttagaactgagtgagtttaagtaacattttttcctggaattagctgaaatagaagcaagacatgagggaaaacacaggcttgtaggagacaaattaactgtgaggtagggagttggcatcaggtataacagtgggatagaacaagggagggcttggggcaggtgggtgcagcagtacagtgtggtggcaaggacagtgcacccctctctggccattgcccatcatggcagggaggaaaatagagcccgtggcaatgttgttgactcctgtagggcatccgacattagaagctcttctgttggggagaacctagacagtatcatcaatgattaacttgcttatgctcggcatctgaaagaaaaggaaatccaatagcatttagttataggacagagcatttacatctgttttcagtatgtaggacttgctggatgacaccaggggcaagacataatcaggtttcttctattttgatgaatttaataaaacatcttgtctttcaccattgtggctagtggctcatccaagctctatcattgttgcattcccttcctcccgctctttaggctttaaaaacaaacgaacaaacaaaaaactgtggcgtaccctatcactacaggaagtccaagaagaatcgctggtctttggtccctccaggttgcctctgtgatgggagtcgtccaggcctgaggtgccctggaacctttgctggtagtgtccgtgccccacacactaagtttggccgccaggacattggctatggctccagttcctgaggctgccatgttatgtgttcagattgtgacatcaggggaccatgtctgggttcttgcaactcaggtaatcctcctccagcttttcagacttctacacttgtgttcagaatcaagccatgcccctcttctcttgctgctgaagcacaaaagtctcctcctcctttcctgtgaggtgtagtcgagggatctgaaaagtgaactcttaattcctacctggacaagcaagcccagaactcacaatgaaaaggacatttgctttttaattctcattttaaagagttcctagccacgctcctccctctttcctctaaaaaattctcaaatacctcttaattcattaataactcaccccactacatattactcaatttgtgtttaattgtggcccttaaaagtagatattattctgattttaaaagcaatgaaaagacctaagtaacttggtcagggtcagttataacatcggagtaaacctaaataaaataaggttgcaaactcaattctgactccataacctaatttcttagtcctacctgccagcctctcggtcggtactcaagaaagttcctgttctttggttaaatttaaatttcctaccacttaacagatatttattatcttaaacagtttgtgagagtcaggaatcttagagtgacttagcttatggttctggcccagggtctctcttaaagttgcagttgagatgtcagctggggctacagtcatctgaaggttggactgggactgggggatccacttccaatatggtgtactcacacagctattgtcagaggcctcagtatgttatgacatggcacatggctttcactagagtaagtgagccaagagaaaagggaaagaaattataatacatttcatgaactagccttggaagtagcagagtactacatctggatgtgaataacaggaggtagggatggttggggaccatcttgggagctgactaccactgacatttacgttggttaatggaagctggcatttactttggttaatgttagtactgtgtgggtctgcagcaccatggtgacaaatgattcctggtttatactttccttaatcaattaatcaatcaatttatatttttcatcaattttttcaactgaagtagagatgtaatttcataagcataatgtattgactgattgcattctctcttttactacgtgttgattcattcacaagtctttactgattacatgcccagaactttttaattttttgtagtgacagggtttcacctaatatgtgccaagtattatactagctgctgaggatacaattgggagaaaattgaatgctgttcctcaccctcctagagtccgttgcatagggaagaaagctattagatggctgtataagtccatactgtgctgatataaccgaataccacagactgactaatttataatgaagagaaatttattaggtcacagtttagcgccttcttgctgtgtcatcttatggtagaagggcaaaggaagagagagagagacagagagaagagttaaactggcagcctcaaggctttctttctttttttttttttttttgacagggttttgctctgtttcccaggctggaatgcagtggtgtaatcatggctcacttcagcctcagcatcctgggctcaagcaatcctcctgccttaacctctggagtagctgggactacaagcatgtaccaccatgcccagctgtatttcttaatttttttgtggtgacagggtctcattgtgttgcccaggctggtctcaaactcctagactcaagcaagaagtctctcgccttgtcctcccaaagttctgggattagaggcctgagacaccatgccttgcctcaagtgcttttataatcaacattaatccattcaaaaggatagacacctcatgacctaaacacctcccattaggccccacctcccaacactgctgcaagggtaataagtttccaatatatggttttgggggaacacattcaaaccatagcagtaatcatacaaataacatgtctctcaacatgtgatgtgtgctgtgaaagaagaatttagtttgctgtgaaaacataaatcgtggaggacctaatttaccttgagaatcagataagaccctatatcacgtttctttttttttttatactttaagttctaggatacatgtgcacaacgtgcaggttagttacatatgtatacacgtgccatgttggtgtgctgcacccattaactcgtcatttacattagatatatctcctaatgctatccctcccccctcccctcaccccacgacaggccccagtgtgtgatgttccccttcctgtgtccgagtgttctcattgttcaattcccacctatgagtgagaacatgcagtgtttggttttttgtccttgcgatagtttgctgagaatgatggtttccagcttcatccatgtctctacaaaggacatgaactcatcatttcttatggctgcatagtattccacggtgtattatgtgccacattttcttaatccagtctatcattgatggacatttgggttggttccaagtctttgccatagtgaatagtgctgcagtaaacatatgtgtgcatgcgtctttatagcagcatgatttataatcctttgggtatatacccagtaatgggatggctgggtcaaatggtatttctagttctagatccttgaggagtcgccacactgtcttccacaatggttgaactagtttacagtcccaccaacgtgtaaaagtgttcctatttctccacatcctctccagcacctgttgttgcctgactttttaataatcgccattctaactggtgtgagatggtatctcattgtggttttgatttgcatttctctgatggccagtgatgatgagcattttttcatgtgcctgttggctgcataaatgtcttcttttgagaagtgtctgttcatatcccttgctcactttttgatggggttgtttgtttttttcttgtaaatttgtttaagtgctttgtagattctggatattagcgctttgtcagatgagtaggttgcaaaaattttctcccattctgtaggttgcctgttcactctgatgatagtttcttttgctgtgcagaagctctttagtttaattagatcccatttgtcaattttggtttttgttgtcattgcttttggtgtttcagacatgaagtccttgcccatgcctatgtcctgaatggtattgctatatcacgtttcttaaccttagcactattaatgttttggactgggtaagtctttattttggggactgtcctatgcactgaagaatgttagcatccctgggccaggcgtggtgactcacgcctgtaatcccagcactttgggaggccaaggtgggggatcacgaggtcaggagttcgagacgagcctggccaacatggtgaaaccctgtctctgctaaaaatacaaaaaatagctggacttagtggtgggcgcctgcaatcccagccactcaggaggctgaggcaggagaataatttgaacccaggaggtaggggtttcagtgagccgagattgcgccattgcactgcagtctgggcgacagggcgagacttcatctcaaaaaaaaaaaaaaaaagaatattagcatccctgaactctaacttttagaggtcctttacccacacatacacaagttgtgacaaccaaaattgtctgtaggtatattcaaataagtgttccttggaaggcaaaatctcccccaattaagaagctaaaatttgccctataggaagtttccagattaaaaagtgttggagtcgggagagcatttcaggagaaggaaacaatctgttagtgagatttttgtggatacggattttcaaataataacacaaaacaaatgacgacgacaacaacaacaaaaagaccatggttacccacctctacttctgaagttaaaattcaaatcactgttgcctgtatgacttgttgctgcccctttaaacaaaaattcacaccctgtagccagcctgcttgtgctgaataaggtgtcttcatataattgtcaagaaaaaaagcaggtctggcctaaagctgtcttccaaaacatattttaacttattgaatctctgggctggttaaagttgtttggccttcagcctcctggtttatatcactgccccaagcagcgtattaccactcaggaatacatggcctcatttttattggaatgatatttataggtaccgcttatcctctgtatgaatatgtttaatatgaagagagtatataaccaggcttggtataaagtcagatcatttccactaagacttgccttatttcaatttcgaacagataaaaattaatttgtgtgcttagaatcctgaaatctggagcaaaaaaaggaacttagaggatctagtgggaaaatcataggtttcagaatgcagacaattatgggtcacatttggtctcagctatatgatcttgtgatcttggacacataaaacagcttcaattttctcatatgtaatgaagataataattctttttttttgtttgtttgtttgagacggagtctcactctgtcgcccaggctggaatgcagtggcacaatctcggctcactgcaacttccgcctcctgggttcaagcaattctttgcctcagcctcccaaatagctgggattacaggcgtccaccaccacgcccagataatttttgtatttttagtagagacagggtttcaccatcttggccaggctggtcttgaactcacgacctcgtgatccacctgcctcagcctcccaagaagataataattcttactttgcaggatcgttatgaaggtatgaaagatagaagcaatgtcaagcataccatagatgtccaaaaatgaaaggtccctcttccctttggtttgtccagttccactcctctcaggtatccccagtggctgttcccctaaaaatttgagagccagcctgtcctaagaccatccctcatcctgtacctccagaggatcttcaaattctctcaattttacctccatttttagttaggtccccgtattttcttttttaaactcctgggatagtttttcaattataccactaaagccaaagacaaaatctaaccctgtcactctctgtataataccttttattagtcccacgggtttctaaaattcaggctctaaaatgggattttggctcacctctccagccccatttctcttagaccttaccttttacatcctgtgctctcacagtgccaaacttctgatgatgtcctgcatgcttttcatataatcatgccttttcaacatcgtgtgtgtgagtaaaataacagtgtttttgtttattcaaagctttatatatgtgtatgcatggcatagagtcacatgttttagtttgtttattttaggacaaaggtatctatttattttatttatattgtgataagaaaacttagcatgagatctctactcttagcaaacttttaaccttctgatatggtcttgctatgtcccatctaaatctcaccttgaattgtaataatccccacatgtccatggaggggggcaggtggggataattgaatcgtgggggtggtttctcccatactgttctcatggtagtgaattagtagagctgatggttttataaatgggagttccccctgcacaagctctcttgcctgctgccatgtaagacttgactttgctcctccttgccttccaccatgattgtgaggcctcctcagccatgtggaactgtgagtccattaaacctctttttctttataaataaccaagtctcaggtatgtctttattagcatgagaacagactaatacactgtgaaacacagtactatgaaatgtaagtacagccttgtatatcagatctccagaatgtatttacctcatataactgaaactttatagctgttgaacagcaaatcatgtcctccctctacccagcacctagcaaccaccattctatccctgtgcctatgatttggctagtttagatacttcatataagtggaatcatgcagtatttgtccttctatgacttgcttatttcacttagcataatgccctccaggttcatctatgttgtcacatacggcaagacttccttttttattttgaggctgagtaatatggattaaagatttaatgtactaatattaattaaatatctctcacatctactgctgtaagacacctagaagaaatagggggaaagctccatgacattggtctgggcgatgatttttggatataacattaaaagcataaacaacaaaagtaaaaataggccattggaatcacatcaaactacaaggttttgcacagcaaaggcaacaagcagcataatgaagagacagcctacagaatggaagaaaatatttgcataccatatacctgataaatgtaacatccaaattatataaggaactcatataagtcaataccaagaaaacaaataacctgattggaaagggggcaaagaacttgaatcaacatttctccaaagacattcaaatggacaacaagtacatgaaaagattctaaacatcactaatcatcatggaagtgcaaatcaaaaccacagtgagatatcacacactggctaggatagctattattttaaaaacaaaaagataagtgttggtaaggatgtggaaaacttgcacactgttggtggagatgtaaaatggagctatgaaaaaatagtatggagttctctcaaaagattaaaaatagaattaccatgtgacccagcaatctcacttctggatatatacccaaaaaaattgaagttagaatctcaaagagatatctgcattcccatattcattgcaacatgatttacaatagccaagacatcgaagccacctaaatgcccactggtgaatgaatcgataaagaaaatggggtctattcttcaagccattttggatgttgtttccttagatggaaacaccctcgcacccttgtccacccatcagaatcctaccgattcatcctcaaggatcagccaccttctgacctcacatttgcctccttccccactgccgtcacttctttgctttgacacaaccttgtacacatttctacactggtatgtgtgacacagtggttatttaagaatttgttaatgggtctgtgttcttcacagaagagtgaattactataaagcaagagccacattgtattaatctttgtgttcccagctagtatcactgaccctgtactagtgcatggtccatatgcatttgatggatgagtccacatttaacgtgaagccccacagtgacaggaactcacaacattgcaaggtattcacctgatttggaccatgtgccctgtgtcaaacttatattgataaatcttccatccatattgtcgtctctacgtccctaccccatctacccacatatcctacttagaaagaatacatataatccgtcgtaaaatcagctgctgtttgattactagaatgcaaccaacatcacctagcaataactttttctcttttggagaatcctttcaattattctttgtggggcataaagtctgcgtcactcaccactttatctccctgatggagatgaggtgtgggtctgtagctaaactcaagatgtcacatctagaactaaattcaagatgctaaatgggctctgacagcagggtaagccttggccctacacatgatatagtggtattttcccccattcttaggggacaaaatataatatgcttgcattattcctgtattttcctattatagctgtaatggtaaccaactctaatgggttcttaccacttatcaaacactgcagaatcagtggcctgagactagtcttctctctctactctctgaattcaactagttggccattctcctgtcctcccatttatactagaagccctcttggtgagactgcttcaaggttatcagccaggttggtccattcaaatagttgtttttttttttgtctatccctccttagcagtgtccttctgccagcatggcaagaataaaaacccatgagcccatggtactcacagtcacataagccatggatcacagcatccagtccaggcaccagggaagccagaatgtctaccctcaaaaatgtctgctgaattcaccattcacgggtcactgagatctgaggacctgtattccataactccaccagtgtaactataatttcagaagtcctgtgctctgcccgaagtctcagtgttttaaaccactcaaatttatttaatgaaacttataattgctcacatgtattgagtgcactttagataccaggaagtcttcaggcagattcatttttaaattgaggaaactgaggtttagagagattaactaacttggcccagaatattacacttattatttagcaggagaggtaggatgtaaacccagatgtaattgcagagctcagacacctaaattccatactgcactgccttctgaatactttattctcatgctatagtgatagttggagatcctatcagtagtaggcagctggaagccaagaccaaggaaaaccttcaggagcaatagtgaccacctatgggtggcaccatttatgcagggcatggatagggacaaagacaaatggaaaagtggttaccgtcctatagggttctccatgccatgacagcatgctctggttcctcttacaccccccaccataccccgattctccctgttccccaccttactctctgtgtcaattgctattatgtgcagccattatttattctgctttgtcccccttctccccctgttttcctgcacggacctagcacccatctccatgacactctccacctggcccaggcagtctgtgtttatgaaattcatcccttatgtctcagttccaggactgctctgtcttgtccatgaacacctatgagagatattgccaagtgatgtacagggatctggaagcagtctgccaatggtgtacccaggcagaaggcagtgtggatttctcctgggatcagaaacatgtggatgctttagaactggctctagtccagggaaagagaagagccatttccctcagtaggaaaatatccccgaactccatcctctcagcaaaggctagctcaggcccagagtccatcaaaacttcaattttatcaaagtctcctctatagatgccattgtatgtgctattaaacagaacaatgcagctcaccagtaaaatcatttgcaataacagcccattaaaagctttccttaatatggaactttctaattaatgtaaatggggtgcaaagcttggaaagccaagttgattctaatgttcagaaagtaggtaaaataggaaagggtcttatttttcattagcaatgtattatggaatctaatgaaatctttatggcttggatatattacccaaaaaagtcacaattgctttgtttcctgcctcatttctctgccacctttctctataaatatcgctatgttacacattagatttgagaaaatagaattttcttttatacaaaaaaaggcatggagtttgtgtctgaatcgtatcaggttttctgtgttgaaggtagaagggaacacagtaaagatgaacattatttcccagatgtctaagttggaaacagacccaaagagaggtgaagactaatcgggtcatttacatatttctccctccttctcttttcttctcccttcccttcttcccccattttccctccctccttttcttccactcctccttcccttcctttcactcaccctaaaacatatattgagcactgtatctgtcaggttaggctagattacagctcaataacaaattcccaaatctcaaaagttaaacatcaaacatcaaaagcttatctttcacccacactatatgttaaaacatcaaatgtttacttctcacctgtatgacacgtccatcatgggtcaacagggagcagtcacacagggacccgggctgacggagctgccaccaagctgaacgttgctagtcatcatgtcagagggaaaatagaaagcggcaaattgggctttggctcttaaagcacttacctggataaaaacaggtcacttctgctcacgttttgttgtccaatacaagtcatctggccatacctaacttcaaagggctcaaaagtatcaccctacaatgaatctaaaaggcccccaataaggtttgaatctgtgtccccacccaaatctcctgttgaaatgtaatccccaatgctggaggtagggaggtagggcctggtggaaggtgattggatcatgggggcagtttctcatcgtttaacaccacatccccttggtgctgttgtcccgatagtgagttctcgtgagatctggttgtttaaaagtgtgtagcacctccctcccttactcccactcccaccatgtgaaatgtgcctgctcctcctttgccatccaccatgattgtaagtttcctgaggcctccccagaagccgagcagatggcaacatcatgcttcctgtacagcctgcagaactgtgaacaagtaaacctctttctttatcaattacccagttttaggtatttctttatagcagtgcaaaaacggactaacacactaacatacctccatgagccaattaaggtaataatctatgatatcaaaatgaattagaaacacaccctactgtcggggagctcagagtccaatgggagaacaagaacacgctcaagacagcatgataagtgcaatgcaaagctacgctaagagccgtaggaccaagcaggctcattttctttcccctttggcagccctttcctggggcttctctgtttcttgctgtgtgaccatcttccccattccgattggggcccaatgtctgggagggagacacattctctgttccagttctcagacccaaaggcttatgagaaggggaactatctgaaaccaaccaggccaggcaggcctggggctaagggaagtgaggagtgcatggagggaaggcccaggttgttccacatctgaggcaggacagtgagtgtgggctaaacctgatctctgcatagcctaccagtcagtgcctaatgcatctcggtgccagaaagctggccattttaggagacagtgctccagcacatggagaaggtggcagcgtgatttagatcagggatccagtctccacagggagctagagagagtgggataaggaaactgaggcaggatgcagcagagggcaacactgaagttcaaggtttttaaaaatcagcctgcagtagcattctgaccccaaagctatctactgaaatagggcttaggttcttagtggactaccagcctcacacgtttactctataggccttgggcaggattgactatcgaactcatgggagccagagattaaagctttgggagtgaaggagtccttgatttttgtgggcttgctatggatggccagacttcatatccttcacgtccctctgcaacaggccttttgaaagcccatgagaaaatgctctgactgcctttgtaatcactttccaatcagcttcacagaattgtaaaattgattatcctgctgatctcacacaagctttggaggaaagcatgggggcactttaattctttgttgagttctgcacactgattcaaggagactttagcttttccattcatgcccaagaagaaggaagttcaaattaccttgaaattacaatttaggggcatcaagcctcggccagtctgtttcattttcccaatcacccggccagggccaaggccgagaaaggaggtacctggcatataactcctttgtaggaatgtggagaaggggtggagctggagaccgagctcctgctgccctccacaggctcaggtgcctctaggaaaagtaagagtgagaggctctgggaagcatgcactggatgcctcaaatttgagtctggttgttctagggtctccccatgagatgatgattagggtgtcatagttataccaaggcactcccactcatttttctttgttttcctcttctgttgtgattaaacagttgggatttctctattgctgcagggaaatgaatagaactttgtcatgcatttcaccagcctagagattcagggaaatcttcctgcaataaaggggcttgacccgggacttgagtaatgaccaggtgttggccagttgtagaaaattggaagttcatcacagacagaggtgacagcatatgccaaggcacagaggcactttgtggagcaagactgagggagggagtggtaggcataagactggggaggctgggcacgccagagttgagcacctgaaggcagaagcaaaggcttacatgttcaaaacgaaatgcagcattccaagtgcaaaaatggagctgtgggggcacggtagaagcaccaagtggggaatggttgccttggagacttgctggagcaagttgagtcagtgtcacacctgtcaaattacacatggaattcacaaggaatttcttttttctctaaatgaggctgataagtattgaatgcttactacatgtcagaactattttaacagctttgcatgaattatttaatcatttcaaaatcctgtgaaggggataccattagtatctgcgctctacagatgaggaaactgagcctcaggaagttaaataatttgcaggtcataaaactggtaactggaggaatcaatattcaaatataggcagtctgaacctagagcccgtatcttaaccgtggcacaatgctgcctccagtgatcttaagaaaatagagcttgttcattcctttgttcattcgacagatactcactgagatatgcctcaggttttgtgccaagttttgggattacagggttgtgcaagatggcaacttagattcccacattggagaactcggtctagtggggagacagaaaatgagtgaacaattaaccaaaaaagatactatcaggttgcaaaggaagagtaaaatagggcatcaggagagaaaacacaggaactggaaagcatctttggtgccacacagcccaaatcctgacttttcgagatgaaagaattgaagccaagaagagaggtgtgatctcagaatcatacagtcagtaggtatctgagaacagaaaaagaatcaaagactcctaatatatttaagagatgtttatctggtgcctcccgctgtcctaggcaccaggaatgcaatgctgagcaagaccatcacggtccctctccttggggatcttacattctttcccctactctgtgggggttgctgtgctgttttcaatacacacttcatttcatcaaatgtcggtttggctccagaatctgaattctcaaccagtgagatgtaccgcatctgttaagccttctattctgccccaacctctgcctctgaaataatcagtcctcctctgggtaggacccctagtactatttctgcactattagttataatgatgctatttttactactgctactctattggtgctgctgctgtattcagaatactatcatccaggttcttcctatagtgttatttttgtgaatcacagcactaatgctaccacttcactctggcttcatctttctcttccttcacttttcttttctgtcctccaaagccatgtcttccacaggcaatttacagaggtggcgaactgaggctcagcgctaggaaatgtctcctccacagtcacaaggctcacaaccggaagcacaggattttaggttgaggtcgtttgttaggttgaggttttaggttgaggtcagtggtactttgaaattgagacaaagagcttgcagctgaaagtctattggtgtttagaacctcgttacaccatgtaggatccaccaattaacaacagcatcagaatctcctgggaatgtgtttgaaatgcagaatctcaggccccagcccaatctactgaatcagagttcagtttggtcgtaagttaaagcttgcaaaacactggtttatgcatgcatacatttgtgttgggggagtgcaatcaggggcaatgaccggtgtttgcccagagggaccaccacgttttgggcatctttaccttctaggaataaaccacttgttggaggagcattagacttgaggatttctggagttagcatgtaccctgagctcaggggtccacttgggctcacaggcagatctcccttgcttttctctcttctgtgggcaactccacccagtgcctgacttctattgcccctgaatgtttctgcaaaggttcttcaagcacaggtgaaatgcatcgctttgctgagaaggaaacagagtggtgaaaatggcatttatccaagttatcaaaggacggaggtaattgcaatatgaaccaaaagacacgcatctgacagccttgctccctctctttctatgtagcttctctttacacgatccaaactatcacccgtgtgtgctttctttaaaaggggaaatatgataacgtcagtctctggtttaattccacagctggcatcccacagttttgtgaagcttgacttccttatcgcgcctttcaagaccctttgcaatctgaccccaattcactactcttgctcatctcccccactatagactcgatcacccagaatttgtcaccattttttcgtactccccaggcttttgtggctggggatctttccttgagctgctccttctgtctggaattctttgcctcaatctgcttaggagcttcttactcccatttcatgtcatgaacactgctgatatccgcccaacacccaagtctgagcttttcaccattgtacctcctgaatcttccctttcagaaggggccatggaaagggtgaggttcttggggtgagggttagggtctggctgtgaacttctccccagagagcctgttatgctgtggtcaggagccctgtggcatttcttttccagaaaggcaactggactgtctggtcacaggaatggaacagaagacatgtctccgcaatggagccattgatcactgtcatagagtgcaaccagctgtggcctggagagggaacatgctttggagaagttctctcagggagagtattccttaatatgagactcttgagagtgtggtgagggtcagccagtgtgagaagattctttcccgatgacatttctgagacagttttgtactgaatcaactgtagaatgtctctcctttctgctgtgggaacataggattgctatttctcccctgcagggtggagcgtttccatctttcatccggcaagctcgtatctttttagtcccgttcatcacagttttctcacgtaattggggatgcaattttccccatccactgtgatcatttgctgttggcaaaattcagcctttggattctggaactattttaatttgtagagcttccacatttttttcccaaagaattttgctatctttatatcctcccatgctgctttattggttatggtggttgtttgtttgtttaattctgattgcttgtattctgatagcaatgttgaacactaatgttctgagcaggcacccccttctttgttttttgctttaatgggactgtcctgactttcactactaaaaatgaaattgactgtcaatcattctataagccttcaccctgcttttcttcatagcatctatcattcacttccttttatgtttaaataaagaaaatctgcctatctatccatccatctatctatatctcatttatttatcggtttacttggttaccacctctcttagttcctttgttctgttataacagaataccatggactgggtaattaataaagaacagaaatatatttctcaaacttctaggaggctgggaagcccggatccaggggggcaggtttggtgtctggtgagggcctagtcccttcttccaagaggacactttgaatgccatgtcctcatatggcagaaggctgaagggcaaaaaagggcctaagctagttccctgtagccttttacgatggcaaaaccatcctggtttaatcacttccccagaggcctcacctcctagagccaccacaatgggaattaagtttgaacatgaattcagtagggttcaaatttacaccgtggcaccccttgtctttcctagtagaatgtaacctctctgagggcagagactgtgtctcactcttccttgtatccttgccacctgatgggcagtcagtaaaggattgttggatataacacagacatgactgtccccttccattaagaaagactttccctgtccccccgacacacacaccccaattacaaatacattactttttctttagaaattgatattgaattttgtcaaatacattttggagtctttgggattaacttcgagctatggctaaaggtaattactttggtcgaatgttaattacaataatcctggtggaatttctggaatagattcttatttgtaatagtatattattcttttaaagttgatatgctggtctataattttgtttttggttattggttttgttttgctgtgattctgctctctgtgtcagattctagttgttactaacttcttgtaagaagcttccagccatgagattaaccccaaaagatatataaaaccccatcagcaatgcatgaaactctcactccagcaacactctgtattatcattttaaattatctttactgtttagaaaagcaaacctagatatctaatataaacttgcaagtatttgatttctggtgaggtggaatctcttttccccccattggtaatatgtatcttggtgaatttcctgttcatgtcatttatcattgtttttctatttgcatgttcttcttttttattgatttgtaagagctttttcatatttgaaaatattgactttctctgccatatatgtttatgtatttttcattttgttgtttccctttaatattatttgattgtaagttttaacattattaccgtatgatttttaaactctatcactgggtttattaaggtacattttcttcatttacttgcgtgtttaaaaagtccagaccagagatcaaacaactagccacagctatttacttctaataaatgtgtggctttatttattttacgtttgacacttgatttaatgaggtttccccttgtccacagaccacacctgaccttttccttgaacctcagagggcagcagaccctgcctctgaaaagttcttgagaagaaagagctggtgttgagagtgagacagatgggctatggcagtgatgctctctgctcagggaaactgccacatttccctgcagctggcagacgctgaaacacactgaggtcattgcttttttatttagatgttaggggttagaggtgctgacttgcacctgttctgcctcctagactgtcacttgccctctctgctcccacctccctggagcccccagttcccaaacagggtgacagaccccaccccagcaccctctggcctcagctcaggttctccgcctggttcctgcatgactcatgctgtgaggtgcttcattggcatctttgacctgtggttcctgatgcaggtcttactggtgacccattctgggattcatgaactgtagggtggtacagggcaaggagagctggacttggactcaaacagtgtgcatgtgaaatctgacctttcattctctggttttggtatatccacagctttcctctcctccctgcacatggtgtcacaccgttctgcatgctacacagaattgtggtcagggtcaagtcattgcgaatgagacgcctctatatgtatgtccataatctctattattacaactgcgaattcatattggtatcaacaggttcatttatagtctgaggttgctgctgctggccactgctagcatcaaaggctgttagatgcatccatgcgggagacaggtcatttggggatgtgacaatcaaaaaggagtggattctgttccctctgagagttcttgtcaatgataggatcctgtcagtttacaaataaaaaatctaaatatttagaaagcacaagcttctgcctgaaaataaggattaaaaatgaatatttatgaactgatagttctgcaactctgtcctcaaaatgcttcctttggtgacacttacaaggctgtcactctttgaacagaagccagagcccagcctggcagcataccattagttccatgaccttgactaagtcactcaccctctctgagcctgtctcctcagcagtaaagttggaagggtggtacttcactcctggtgttactctgcaaagtaaataacgcaatgtatactgcagagcctagtgaaatgctaggcacacagtaggtactcagcaaaatgtgcgtgtcctccataggccctatttcactgagatccctgtcatttcttcctgcctaggatgtggcagaagcctctgtgttttgttatattttagttagacattgttttagtccattcaggtggctgtaacaaaataccacacacaggataacttataaagaacagaaattttttcttgcagttctggaggctgggaggtccaagattaaattgccagcaagttaggtgtctggggtgggttctctttctcgtagatggcaaacttcatgctgcatcctcacatggtgaaaaaggaaaggtgtctctctggggtctcttttataagggcgctaatccttttcctgacagttctgccctcccaaaggtcccaccttttaatattatctttttcagagttaggtttcaacgtatgaatttggggggacattcaaactttagcaaatatcctctaaattgaattaaaaaccctttatcagaatcgggaaaaccctggcttggcatagtggctcacgcctgtaatcccagcactttgggaggctgaggtgggtggaccacttgaggccagaagttcaagaccagcctggccaacatggtgaaactgcatctctactgaaaatatacaaatttagctaggcatggtggtgcatgcctatagtcccagctacttaggaggccgagacaggagaatcgcttgaacccaggaggcagaggttgcaatgagccaagattgtgccactgccctccagccttggtgacagagcaaaactccatctcaaaaaaaaaaaaaaaaaaaagagttaagaaaaccctgtcttctgtttaacagtcactctccagtccagaacccctattttctgaccaactgtcttgctcctctgtctttaattgtctcccttcacttggaaacatagccaagggctgatggatcttctcatctttgaaggttggactcttcatgcttttattacatcttggatattagggaagtaaggaatgtttggagtctcttgatacagggtgactccactctccccccagtacccaaaatagcctgaagactagctgcataaacatcctaggagtagagaagtcttgctaaaactgctgatgtcctgactacattctggaccaacctacatgtagactcagccccaaccacctgccatatgatccctctaaggtgaccccagtcttactccctagttcaactggacaggggtagaaagactacaatttagcagctcacctggacacaactgataatgcccccttgatgaaaggactgattctgaaattaccagccagtgtagttgaggttcttaacatttcttcccttgaaccagggactgggctcaaatatatgatatagtggtagaatttcaggcactgggcttggcaatttggggctggagaacagccctgggcactgaaactggagcttatttattcatgcaacaaatatctattgaggatctactctttgttttaggtgctaaggatactacaatcaccagagccaacatggcccttttgtgtgtgttgcttagagtcttgtctgagtggaaaatattaatcagataaacagataaatgtgaaattgcatgagtaatatttgcttcagaagtagctgcaggagagggcttgaagtagagtgtcagttgctttttcttagtgtgttctctgtaagtggtgctttggcagcagatgttaagatgatagtgggaagatggtagaagaagcaatgtgagacataagaccaaataatcagtgctttgactctgagtcacaaagaaaatgttggcacaggatggtgccttttggatgtccttattccttcaccgaccagtggtacagatcctggccccatggtcaggttttacctctggctgaaaccactgccctatggggctgctgttctgtaccactccagaggtcaccatccccattgttatagtgtgaacaatgctcctgcaagttgtgcaaaatcatggttcttgtcctttaaaagccattgtggcacattggacttgagcagggaaggtttgcccaagtaaataacaatagagctcagaactgaaggaagaggtgttaaccaaaccaagagagggtggaaaatcatgctgtagtgagggaacagcatggccagaacctctggtgaaagatgtagggccagtacctggggtagggaggaggcaaatgtggtttgagtgcaaaatcagtgagatgatgtgggagtaacagcaaccagggcaagaccatgtgtgatcttcaggccacagtatagatggttgcttttatcctaagaccaatggaaaactattgaagaactttaatgtcttaacagtaaggatagattgtgtttatccagtgcttattatgtccaggcactgttataggggctttacaagtattatctcagttattccccattctgacctataagaaagggacatcattgtctccatttaacagaagagaaaatcagggtaccaagatgctaagcaccttgcccaaagtctcaaagctagtaagtggcttacattgttaatcactgaagacagttgcctcctgcttttgacaagaagtgagtaagggctcctaccgttcttgagtgtagcaaggaaaaacgtagcccgtcctctgatgaaaaggcccacccctctgccagggacatgtccaggcagggcagcatggtatacctgagagtttgtgtagctcaaggggaaggcttgacacctggcacaggtactgactcctgtcgctggccgttatctggagctggtgcctgaggattccgacaaggcagagaagcccttatcagcccacacagctgcttcctgggctgtttcccccagggagttacatggcagtgaaatgaaggcattgacattcagttccacttcttggacaagctgtgctgccttggggagcaccagatacccatatgagttagtgtggtttggagtctgcactttggatgaatccatggctcataacacacgggttacaggatttgggatgggtaagcatggacctggacacagagagaggaggggacatgaaggcagctactgagctaggggagccagcatctcttggcattttgctgaggaaagagcaaggaaaagattgaagatccagatgaggtgttcacttaggtgagatgttctcatcagggaaatatactttctgaaaacacaacatccctcaaaatagctcaaattgccttacagaaaatcttgagcaggggatgaaaaatgatttggcatcatggacatacaattggaaacccgatacccaggcttctcttccttttctgttccccattgtctctgcttcttgcttccttaagtgtgtctgccccatcctcctttctgcacgctggcttttctctttgtttgggtgttgattttctcccctgtcacccacttcaaaggatgtgttcttcagcctgcaatgggactaactctggcccccactatctctgggcctttgagctctggcacctttcatttttattttgtggcttaatatattcagccctcttagcaattgaatatgttcccacagcaccattgactctataacagcaatggtggttcaggagctgggagaagtagcctgcgaagcataggttcagggtagagagggtattaaaattctccagatgcacccagatttggagacaggtagtgcgttccttctcttacagtctcatttgttggagtgctctcacggttcatgagttatttattctttggaggcaaaatctgggcccctagaatgtttgtcattaaatgaaagagccaagccagacgtggtggcacacatgactgtagtcccaattactctggagactgaggtgggaggattgcttgagcccaggagttcagatccagtctgggcaacacagtgagaaagggaggatggatggatggatggattgatggacggacggatggatggaaggaaggagggaaggaaggaaggagggaaggagagaaagaagggaggaaggaaggagggaaggggagaaagaagggaggaaggaaggggaaaaggtaaaggaaaggaaggaaggaaaggaaagggaagaaaaaaaagaaccagactcaggactcctccacccctcacacacaggctaggcagcccaaggcagtatggttgagacactgtataaccccctctgaggctaacagtgaacccagtgagacagcgataaggcaagaagccagtatgagcaggtctccatgggagcgtttctatatttatattcagagcacttcaaagaatatttcaattgctattactttagcaaaagtctttcatgcaaattttgatatttttcaatgaaggaggcttcatccaaatcaatgcaatgattctttccacctcctacatgaaacacccagcaccttttagttacacaccttcaacatgccaaggagagagtctctgagttgctttcctcacatttgggggatttgtgaactctgaatcttaataagagcctagagttctaggtgtaaaccttgtaaagagtttgtgtgactttaaatattgccccagcgggttaccttgtctctgaaagcctgctacgctcccagccatacttgaagggcaatgggtttcaagatctcggggtccctgggatgctaaagctggagggtacatctgctaaagctcagggaactcccattttcggagagcactgcttacaataacctttgatgtcttcaagtcaaggtccacactcctgagatttagcttgggatggccatgctgggtacgcagtggtcatcttctcagatgcctcctcaataccctgaatttgtgttcatttttcctgcccagggcataatctatgtccttgttcttccccacactcacccagaaggagcccctgaaggaagcctcctgggaggttgttgagtcaggcagctgaaccagaaggaaaggtctagaaactgggctgtgcagcatcccctgggcccaggaagcatggaggtgggactcctgcaccaacttgtcctctcaggtccgcagcacccagagcctgggtagaagagcctcaggagatcaggggtccctgcatcctgcatctatggtctgagttggagctgttacctttcaggatgaagagttcagtcctgcaaccagttctcaccatgaagtctgtctcagcctggctctcacaatttgtagcagcccccatgccacccaggctagatgcctaaatctttcaaagactcacagagatctgtgtgacccacacacacccctttcaccccatctcccactctcctctcctggaaagctcttctcttgggtatccacttagctaattccctcacctccatgacgtccttgctgaaatctcactttctcagtgaggctgatcagtctcacccctgcatcacctgctcatgcacacctatcctccccaccctgctctgctgtctccttccttttcttttgttttctagagaacttatcatctactaacataccaaataaatggcatatttattacattcattatatttttctcccctcctctcaccttcctagtaactagaaggtaaactctaggaaggcagtgtcttcactggtttgttcctgggcatatctcaggtgcctaaaataacagctactgatactgcccaagagatagttattgactccacatgaatgagtctgtggtttccccaaaaataccatcaaacaccctctctgatgttgtagattcaggtctgactgacctactcgacagtctcccaagtgctaggaattttcaagctctcttatacacatggacacatttcaacttcatgaaaaacctttcttcttgatgatggaatcgaatattattgaaggtcacccaggtgctaagcatcacagcctaaaaccagcccagcacacccaagatcaagttcacattgttaatcaggttcacactgtcttttataatcccaaagtatttccttttattctccatgaatatttactgatataattcaaaacaactccttcctattatgaaccccttcccaaataaaatgcgggagaaggattacatctataaagaaacacaatccaagaagtacattttaagggaaaaaaaggcaacgtctcaaagccactttcttttctggtttttagtttgacttttccctccaatgggtgcctaatgaggcgtgactgcagaaggctgggcaatcaggctgctcacttcgtgggttttactctgcaatccccagcttaggacaccaagtttatagccttcgcaatcagcttcgctcacatgtgccgtgtagccactagaatcacaagaggggcagagagaaaaggcagtcttctatgactccagtgctcatgttcttacagcactgcccactggcagaatcacaggtgagtaagagggactgagttccttgtctccaaagtgttccagatgattccttgatggcccctggcattgcttgtaggggcatgtctcactcagatgggacagaagaagaacgggacagaagaagaactggacagagagggcagagtggtcaatgacaaggtagagcttcttgggagccacaggtgcagaaatggaccctactggccagtgggaagccacgagatgggaagggaagcaagtgccagaatctctcagaagctgagggagaaaaccacttagcacacagttagcaacctcccaagtctggggtagactggggcaggggtctgggaggagttggaaaatggagcatgtgtctctgcacagataacaagcctgggcaccacccatctgccaatgggcactcaggggagggaagagaggcttggtttgggtgtcaggggacctgggctaccctcaagggtggcctctggaccttcagcattaattaggtgtccactaagagagagaaggcattgaagaaggtggtccacaaggccctgctgccctgggctgagttgtggccaggctgaaggacagagcccctggttaccctgtgagggctttgggaagtcccctcgagcaggagggaagtcatgggcagagagcacgtcttcctggcaactggctgcaggtgaggagggggacctgactcctggcactcagtgtggaagggaatgtgttggaaacagcaatgcaactccaatattagcattggtgccacactcagcaccactggatgctttcccacaagaactgcctcatttagtccacacactcatccttattttacagataaggacctgaggctcagggccgttactgcttgctctagacgaagcttgtccaaccctgagcccacaggctacatgcgacccaaaacggctttgaatacagcccaacaaaaatttataaactttcttaaaacattatgagattttttcatgattttaattttttttttgtctcatcagctatcgtcagtgtgagtgtatttcatgtgttgcccaagacaattcttcttcttccaatgtggcccggggaatccaaaagaccggacacccctgctctagatcatgcatgcttaataggggtgccatcgaccccaagagatgaaaattggttcttggtggtagtggtgggggtagggtggggaaaaatcccttttcatacacatatgcataatacgcataaagcccacatacagccatgcaggtatgcatagcgtccatatacagctatacaccacatctgtagagttaaaattcataggggtacaacacagaaagtctaaatacatttcttaggaggtgatagtaaagaaaaaaatgattgagaaaccctggtctagctactagctacaagtggctattaaacactcaaaatgtggctagccggaatagaaatgttcagaatataaaatacacaacaggtttcgaacacttagtgggaaaagagaatgtaaaatatcctcaataattttgtgttgaatacatgttggaataatagcattgtggataccttgggttaaagaaagtatattactgaaattaattcccacctgcttctctttgccttttttccccatgtggctcctagaaaatataaaatcacaaatgtggctcacatcctatttctaatgggcagtgcagctataaatgaccatctgctaagaggaagcatcaggatttgtacccaaggtttctgactcctttgttatcccatcgctgcctccttcgagtagaaccagttactgtggggccttaggtgtgcttcctaacctctctgagcctcagtttcctcctgctcccatctcctttcagcactctgtaaatggagtagttccttccagctgtgaggttccactctggacccagctatgagcctggggtcactgcagaataggagaacgtagagtccccagatgacccatttcatcagaaatgacagttccataaacagcagtgtcacctgctgtgtgtctgcttctggggaaataccacagaggcaaagttagaaaaaggaagcttctaacctgaggccagagggttggagaaaaggttagtataaatgatcgttttaaccaagaagggagaaaaaaaaatgttcatctcttctagtaagaaggagatataacaaaaaaaaataggctttacaaaaccttctcatagtaagtaggggcgaatacaatttcttacaaatgctactctgctggattgaattgatggtgtagtctccaacatgccctccctttcgttcctttcctaatgcctaatttagtgggggagaaaatcaattctattttaatttcatgagaaaaatgctgaatgaaagaaaagtgcaatagagtgaaacttcagccttcagccccgcactggcccagaatgtgtgattacgtgatcgatggatttctccttagaagggcctctcaacctgatccctgacttggcctctgacaatgatgcaggaagttcccaggtggtcagaaaacccctctggggtgcttggaaatgcattctagcatcaagtcccctgatcgcccctaattctccagatttatttccaccccatttcaccttaattttggcctctgtgcccccaacgatgcactcaaaagctctctctgcctgtccaaatactcctaacatgtctttgcactctagctgatcctttaagagatttccagcaaaagtttttggtctcccaggccctggaagtaagactggccactcttcatgatgacaaaagagctccaaggttaagcaggtggattctagattcatactgccggggttccaagcctgcctctgcctcttcctatctgtgaagacactgggaagttgctccccttaagtctcagttttctcatccgcaaagtgggaatagtaacggtagtagcctcataaacttgtgggatgattaaacgagtaatgtgtggaaagtgcttggcaaggcacctggcaactagtgagtggtattaaatgtcctctcgtgttgttaatattattgtaataggccgggcacggtgactcatggctgtaatcctagcactttgggaggccgaggcgggctgatcacctgaggtcaggagtttgaaaccagcctgaccaacatggagaaaccccgtctctactaaaaatacaaaattagccaggggtggaggtgcatgcctgtaatcccacttactcgggaggctgaggcaggagaattgcttgtacccgggaggcggaggttgcggtgagccaagatcacaccactgcactccagcctgagcgacaacagcgaaaactccatctcaaaaaaaaaaaaaaaaaaaaaaaaaatatatatatatatatatatatatatatataattgtaataaattgctgcaagaatgtgaggggtggaggggtgtgcctttggcttctaacttgtgggtccatgattacagatttgccaatcaatgagacttagtgcacattttttgttcttttttttaaaaaaaatatttagttcttttttttttttttttttttttctgaaatggagtcttgctctgtcgcccaggctggagtgcagtggtgtgatctcagctcactgcagtctctgcctcctgcattcaagtgattctcctgcctcagcctcaagtagctaggattacccgcgcccgccaccatgcttagctaacttttgtatttttattggagacggggtttcaccatgttgaccaggctggtctcgaactcctgaccccagatgatccgtcccccttggcctcccaaagtgctaggattacaggcgtgagccaccgcgcctggctcaatatttaattttaaaataattttagacttacagaaaagttgcaagattagtatggagtttctatatacccatcacctggcttccccttatgttagcatcttgtataaccacaggatagtgactgaaaccaggaaattaacattgatagatactttaagctacattataatgaacactataatctacaggccttatttgaatttcacttatcttcccactaatgtcgttttccagtccaggatcctatccgtgtttcacttacttgtcattttttccttagtctcctccagtctgggacatctcctcagcctttcagtctttattatttttttaatattttatgaccttgacacttctgaagaatactggtcagttattttgtagactgtcctttaagttagtttttttttttctttctgatgttttctcacgattagatcgagattatgcatttttggcaaaaaataccacacataaccctttctcagagcatcgtatcaagaggcatatgatgtacatatttatttttatttttattttttacttttgttttttagagacagggtctcactctgtcaccgaagctggagtgcagtggaccagtcttgcctaaccgcagcctcgacctccctggctcacgcaatcctcccggcctcagcctcccgagtagctgggactacaggcatgcaccaccacgcctggctattttttaaaaaaaattttttgtggagatggagtctggctatgatgcccagcctgaatgtccatatttctcattactggtattgttgacattcatcatttggctaagaatgtagcatgtatttgttaagcatttactgtttccttttggggatatgaaagagaataaaatattgccgatgctctttaagaaactcttgtctaatgaacaaatggtgttctagttactactgctggtaacaaatcactccaaaatttagtggaataaaacaacaactttattatgcttacatattctgtgggtcaggaatgcaagagggcagggatgatttgcttcagctccacaatgtctagggtcccagctgagaagactcaaatgaccaggggtgaccagagagccgagaactggactcacacggcagcctcctcacttagctgtctgttgcccagatgactggactcagctggggctgtcaatctagagcatctacacagggactgtcatgcaccctgcgtttgctcacacatggcggccccaggggagttagacttcttatacagcagcttagacactgtagacataagagtctctgtggacaagtcagaaactacattgccttcatgacctaatcttagaagtcacaaaatatcacatcccctacattgtatcggtgagagcagtcccaagtcccctaagacttaaggggagtcaggggatataaacaccaccttttaatgaaagcagtgtcaaaggatatgggctattttctaaaaagcaccaaaaggactttctacttacacaggtttagaaattcaggcccagatacaagaccttcaccaccttgggcctccttaattattaaatacatagttactgagcaccaactctgtgccggacaggcatggacccagcttctgggcttgcttggcaagtccctcctgagtggggtgggctcagacagaccctctacaaagcctcgtgttctgacagttgcagcctcccctcaatcagcccctctccctagaaactgttcacacaggatgtgcacagaggagccaaggccaaggtggcagggtggggcggagaatactggacttcaggatcagaatgacctcattttaaatcccagttgtaccacattgaggatttgttacattttcattcttaatcctcatgtatttggtaaaccttattgactccttctctatgccaagctgggtgcttggcaattattacaatcaataaatagaatctaggctttgcccttaatgaaggatttgttccaggcggtgtctgccagaaaggctgttagtatggctgcagggttccaatgagcaggatcatgggattatttaacttcttgcatctccatgcccaaagccaactggagaggaattggtcatgcaacttagcaacttaaccaggttaaacttagcagaacagaaatcagctgagtgtgaagttggaaggcaagcagctcacgttcagaaacccaagaagtattgcaatacagactaaaagccattgggaatattgctagacagactcattaaacaagaaggtttctgtgaaaataacaaaatcatagcacccaggacaccccagcatgagactaaaagctgaaaggaggttgaggcttcatattattaggctgcattatggtagttcaggaagaaagagcttagagccgtctgagttgatggtggccctgctatgggactctgactgcattctttgaaatttagggcagctgggaagagtgaatctcagaatatccctctcatgtgaggcaggggagggaaggcaatgagtctgggaagcagcccggtgctaaggattggaggggccagaggtgttggtggagggagcacctgttgacaggaatacactcacctaaagtgtgtctggtagctaaggagcaggatggtgacacagggaagagagccatatgcatggtaggcacataatgtttgttcctgttattatcacccactaactaaccctccattttggttgatggatggtgaatactaaggaccctgggccagctggatttcgagtttgttttctccctatgtttgatcccacagccaataggaaaacagctgaagtcagagagcagggcattgattggaaatcagcaaaagccatgttgggcaaacgagttaacttccccactcctacaacagccctttgatccatggtaaccaagaaagtccgcaccaggctagaggaagcccctgcagggccgcagcagggctgatacggccaggaaccacgggcatgggtccctgtgctggcagtgctggggaaggtgtgcagcccgggcaggccccggcacagccaaccaagcctgcaggctgagcctctgaccctgaagcttggctttggaaagcagggaagcctggcagatgctgttcagaggcgttgctgctctgttctgttgtctccagggcccttcggctggtgagggtacaaaatagagcttcagtcgcttaaagcttggtaagtgatgggtcagagtttcagccctggctctgcaagactgtcagccagtggtcttccctcccgctggctgagacccacactctttgccttcatgaatgttaacagcattggaagcacgaggccagtaaggatacttgcaggtcttccccagtggttttcagccttaggaggctcaggtctggggccatgtgttggctccgtctcattcttacatttctagggacctcattcttctccagccaggactcagaatctctcagagtcactgttgtcacttctccatctcctctgcttctggttgaaacaaggccttctttgtatttgtcatctgcatgagagccagaccctccaaagggaccccggtgttgttcctctggtcatttcaatcctccatccccttgcctgagaaagtgtttctccaaactcagtgtgcatgagaatcacctggagagcttatgaaacaacagagtgctgggcctcagccccggacattctgatcaggaggtctgggatagactcatgaatctgcagctctaacaagctcccaggtggtgctgatgctgtttatctgcaaaccacacgtttagtagcactgtggtatgatcctgtgtctctcttgatggcctaccctctcctttaatggctctatattaccctcgaaataaaatatatacacttgagtagttcattaaaggcttccataatctgagctcagcaggaatgccacctactgttgcttagtttgtgcactgcacaaagacacactaccaaggaaatgaaatccattaaactctgtgctgtgtctgccaggaagaatatgactgggcaccaagaaaagcgtatcttcttcttctcacaaaggcagcatcagctcactgaagtacagggggctgagactgagttgagacaggcaccttttctactttgcacaaaagcatcccttaggcaagcagttgtcctgcccaagagccttttcttctttcattctccaccatctcctgtcatgcctcccacccttctcccatgctcctcatctggttaacagcttcacactctatgaggaaggcatctggccccagagactcaatctgttttctctgttacatgctcataagagccatcttcccttccttcagaacagagctcttaatgtgccttgcccgcttattcctgtgggccatacctatctccctcaccaaattgtaggttcctgaggattctctagagcttagtacatggccaagcacctagtcaagagctcaatggatatctgtttaggttctgttctgcagccacaaagatgctcacagcagccaaatctcagcatgccatttgttgtcttttaaacaattgattttgaaataagtttacagagaaactgtaaaaaaaaaaaaagagagagttttatacccctcatacaactttccctaatgttaacatcttgcatagccatggtatatttattaaaattaagaattcacttcagtgcattattattgattaaatgccagacttttttttttttccagatttctccaggttttccacagaggtcttcttttttcttctaggctctcacatagcatttcgttgtcatgtctccttgttcctcaacctgtgaccatttcttggtctttctttgcttttctatgaccttcaaacttttttgttttgtttgtttgtttgcttgcttgctttgagacatggtctcactctgtttcccaggctagaatgctgtgctgcgattgtggctcactgcagcctcgacctccagggctcaagtgatcctcctgcctcagcctcccaagtaactaggactacaggcgtgcatcaccatgcccagctagttttttaaaacaaattggtgtagagatggggtctcgctgttttgcccaggctgctcttaaactcctaggctcaaataatcctcctgccttagcctcccaaagtgctgggatttcagacatgagccactgcgccttgatacagaagccaaagccactcatggacattctggagccttccttccaaaacaatggcttgtcttccaggagtaaagaaatgggggtcactctgcaacataaaatggaaactaaaattagaattataatttttcccttgaagaactcgaggctcagagaggttaagcaatccctcaagctacacagctaatttaattattcatttagacatgcaaaaggatgaaatgttgaacaaacaccagatacgatctttgcctccttggagcttaaagtctagtacagaggtctgcaaactttttctatgaaaggccagaaaataaatattttaggcagcgtgggctgtagggtatctgttgctacttctctctgctttcgtagtgtgagagtagccataagtccatatttaaatcaatggtgtagctgttttccaataaaactttacttacaaaaacagatggtagattgaatttgacttgcaagtcatattttttcagctcctgggctggtagaaaagggacttattgatgaaataattacatggttacatggaaagttagtggctcaaaagagagacaggtgactctggaaacgtaaaataagaacctgggagtcagagaagatacccataaaaagagtccctgtaagtgaggtccgctaagggtgaggagtcatgaatgaggcaacaaggaggcatgggaaggaagacggggcccaggctgacagaagagctggtgcaagttcctgtggcagaaaagaccatggctctttttagtactgaagtaaggcttggggtgctggggggaggacgagcgaggccagctcacgcactgagctgattaagaccacatgacagagacacattcttcatcctgagagctctgggaaagcattgctcttacgacatgattggattttgtcattgttgttgttgttgagagggagtttcactcttgttgaccaggttggagtgcagtagcgccatctctgctcactgctacctccacctcccaggttcaagtgattctcctgcctcagcctcccgagtagctggggttacaggcatgcaccaccacacctggataattttttgtaattttaatagagacggggtttctctgtgttggtcaggctggtctcgaactcccgacctcaggtgatccacctgcctcagcctcccagagtgctgggattacaggtgcgagccactgtgctcagcctgggatttttgttatgaagcacctgctttggtttctggctgtggatcctactgtcagcaactaaaagagaagggggacatccttgagtactttttgcagccagaacccatgccaggagcccagggttgatgtgcagctgtgtacccttccccctactaaccctttattttatgtttgctattctacaaatcttccgttttccccgcttataaatgaaggttcatattatattatacgtttacagccacagctccctcccatcccatttttctcacctttcttctttccctccccagcccgatccctcactaacttcgtgaaacttgcaagttaaatttttcaaagactgtttctgacaaagcagtgggaattagatttggtgaagcccttcataaaaaattgaagacatgctatattaacatacattgatttattcatagtgtttcattacaagtaagtgaggatcctgtaataccaggaaaggttaggagagcagaagagcgcggtatattatattgacagctcggtggaaattgagttgcttttggattgaatttggagcgcaggaaaggaattggctagtaaataaggcatgagttttacctcccagtgtctgtatatcaatgtagttgccaccagtccaagcagggggacggggacagaattttcaaagaatgcaagcacacgtcctctccactggtgcactggggttggtggctacaggctgaactgtctgtacatctccccttttctgccacagtggaaaccagaatccacctgcatgctgaaaactccatttgcccccatttgctcactgctctgcagtggctctgggctttgctctgtccaaaccttttcccatcccagatctttgcctacgcggttccctctgcctagaagctagaatactctttcctcttctgactcaggattgtccttcggatgtcagttgcactctctcctgagatacctccacgagcatttttccttagtttggtcattctcagatgcagaccctgagatggggatttgaatatgagcagtttgccaagaagtttaagaaacaccagtaaagagatatggagtggggaagagaaaggaaagtagccaatcatcactgtgttttcaaaccagctgcctctagaggcaagtggagctgagcctctcagggaaattgggatgctgcaggaataccaaggagggggagcttgcaggggtataaggaaggggagcctggagaatgtatgcatcaactcccatcagggctggggtgttaattaacccccattcccagcaagcacccatggagaaagtcctcaaacagagaggcagatagatgcctgtagcacttgcctctgagaaggagtggggtgggtaggggtgaccagagggaatgctgtagacaggtccaccagagcagcctgaagctagcagccacctgcatggtgcacatgcacactcaggtgctgcttgaaaaaaagcccaaagccctcagctccctgcatttttcctccctcctgcgcacactctgctctgggcaccgtctgacctctctcctcaaggatgcggcaccactactgtttaatataggacagagaaatcacttttctctccaaaacacttggtgccattgccagtaacagcaaattgcttatttttgaagggaagttggtgtgcttccttttctgcctgggtttggccattcttgatggaagataagtgatgtcagctgtgtatatagctggcttacctctctcaagaatggaagtcacttgaggatgaggcctgacttgaattcagttgggcacctctccagcagcacacagtgcagggcctagaacacaggagtacacaggaaacactgtgaaggagcaaataagtggatgagtgaattcatttttcaactgatgcactgttaacaggccaggcaatgtggtatagaatatagagtacaggctttggagtcagacctgcctagtacggtgtctgcaagagattgttgaatgtacctgggaatgccttatttgctactacccatgacaacatggatgaatcccatggacataatgataatgttgagagaaagaaaccagaaacaaaaaagcgcgtttcataggatttcactgatacacagtgcaaaaactggcaaaactcgtctatgctgttaaaagtcacacagaggtgatccctgatgggggtaggcaagtaggattgcaagggagtgtgaggaaaacgttttgggcctggtaatggtttggtttttgattatatgactgtatccagttttcaaaaattcatcaagagttatgcttttctgtatgtatattataccataattaattttttttttaattttttagagacagggtctctctctctcacccaggctaaagtgcagtggtacaatcatggctcactatagccttgaactcctgggctcaagccatcttcccacctcagcccctgaatagctgggactacagatgtgtaccaccaacccagctaattttttaatactttgtagatacatagatacagagtcctactgtgttgcccagactggtctcaaactcctggttctagcaatcctctcaccttggcctcctaaattgctgggatttcaggtgtgagccaccacacctagcctaattaaatatttttaatggaacaaaccaggtaagacaaacaaaaaatcttgtgtttgccacttcacaactgtgtaatttcaagatgtgacactcaaagtgtgatccgtgggaccagtgctgggctaccaattgttattttcacccttgggcaagtgcagaagttgagagtgagtgcttcaaaactcttctagtaccttgctgtgacactcaagtgtgtgatcagggaacagtagacacaaatcattccacaggtgtagaccagtttggttattgctgaactcacatgatatgtcacatggggcatggtcttcatataccatagacaaactatctccatatacaatttgaaaaatggtgattgcatgcaagttgcttccattggcacctcagtttctccattattaaaatgagagtagctatcctgatgcccccaaggatttgaggaagacaaaaaagataatgcacgagaaagcaccagtcagcaatcgctatctgtctggaatatggggcctgggatctgcatttttaacaagactcataaataattctcatcgggacgctctacctggacactgttctatgactgcagtgtccagcatggtgaccactggcctcacggggctactgcacttatgaaaagcagtggctagtccaaatgaagaagcgctgaaggggtaaaagacatatttgtaagacttcatacgaatagtagaatgtaaacaattccattcaatttttatgttgtctacagattgaaatgataatagtttggatacactgggttcaacaagatgtgttgttaaaattagtttcttttttttttacttcttttcatgagactgtcagaaaattcaaaatgacatctgtgggtcgccctctgtttctttttttaaaaattttttgtgggtacatagtaggtgtatatatatttatgggttacacgaggtattttgacataagcatgcaatgcgtaataatcacatctcgatagatggggtgtccatcccctcaagcaattatcttctctgttagaaacaatccaattatacccttttagttattttaaaatgtacagttaaattatttttgaccatagaccgcctgttgtgctagcaaatgtaagatcttattcattatttcaattttttctacccattaaccatccccccacccggtactgcccttcccagcctctgataaccatccttctactctctatctctgtaagttcaattattttaagttttaactcctacaaatcaatgagaacatgcattgctccagtgggtgagcaatggggtatttggaggctgggatcatctggaaagtggacagcaacaggcagcttagcagaatctgctggccaagttcacatgcctgccccttcccccgcctccctaaggttcctctaaaggagctccatccagcttcctgagtgaggcatttatttgtttgtttgtttgctggcttgtcctacagatcaactacaaggctgtcggctcgctggacccaagtgctgacctctcgagccagagggggaaagtgttcaagctccggaatgaaacccaccacctctttgtgggtctgtacccagggaccacctattccttcaccatcaaggccagcacagcaaagggctttgggccccctgtcaccactcggattgccaccaaaatttcaggtatctctgctagaaaggaaaaaggaaaaaaggttgtttcacccccacttcctgattttccttgaagtggaaatttttcttgaattgtcaccctgtgatatgggtggaattaggacgatccagtccctagtgagttaccattgttgtctcctatgaagaaaatctaagtgatgaacttcctaaagtgtaaaaattagattaattaggtggcaagccactaaataatttgcccacagggttgcattaaatagtacacgtgtgtgtagataatgtatattgcacacaagttggttattaaattcattttcaggaacattctttttgccagaacaagacattagcgcaggttctcatgaaatacctgatgaatgaatgaatgaatgaatgaatgaatgaattactattatagggccacagtagtccaaaattacagactgccatcacccgtagggccccctctgccactagacagcaacaatgcagaattatttcagaaccttttttacagctttcattatcctaaatatgtatgcaattctggtctgcatacatacatattttgcacatggttttccagaaaaacatgttttttttgtagcttaatgttttctcttatctttatcccataagtgtttcctatgttgctacattgctttcgttataatgttctgtcaagtggatggacgtaatttaattatacattcccctgtggttggatatatttggtgcttccgtgtctttacaaaataacgcttcaataaacatgttacaaaataaagtttaattcattggtttggattatagctttaggaataaattcagaatttggaaaaactgaattaaaaaggatgtgggttttaatagctgttactacaaatggctaaattaccttcccaaaggaatagatatagtcgcattcctatcagctgagtatgagggaagggaggtctcatgaaggaaaaaaaaaaaggtagaggggaagtagttcataattgatgtaatttgcattttaaatgtgtttggcaaggttgactctgctttcacttctttgttagtacttatattccctgcacatatctgtttattaggtgtggaacgttttggttcatgcaggttactcgacagatcattgctacccttccccacactactgcaccttgaagaaacctactatgggcaggttgggcatcggggcctcctttactgaaggcctggaaggcttcttatccaacccctttcctaaacgtcctccctctatccatgctgtgtctttaaggatggcagcaaggggcggtggggagccagttgggaatctgtgctgaactcacctgcactctctgtttcctgtccagctccatccatgcctgagtacgacacagacaccccattgaatgagacagacacgaccatcacagtgatgctgaaacccgctcagtcccggggagctcctgtcaggtgaggatggttcttcacttggagtctgcagtttttcttctctgtgccacatgggcctccagttgaatcatgtgactggcaatgcccatgggcaagactggccaggagcaaagcttcctcggaggaaggaggtcagcagccccaagcccagttcaaagggagcccctgagttcaaggcaaacctgggtgacatagggagaccccgtctatacaaagaaaaaaattttttaaattagctggatgtggtagcacacgcctgtagtaccggctactcgagaggatgatatggaaagattgcttgggcctggaagaccaagagtgtagtgagctgtgatcatgccactgcactccagcctgggcaacaaagtgagaccctgtctcaaaaaaaaaaaaaaaaacaaaacaacaacaaaaaaaaaaacaagaaacatcctaatcaggacctgagatggtctagaaggaaacttcctggaacatgtttatggtaaatttagttagtggggtcggtggcctggaacacagtctcctggaaaggtcacttttctttgtgtcactgccagtaacagccagatagacaggtttgctgaatactgaaaacaacctgctcagatatcacaaatctgacaagacctggggactggtccagtttaaggctgtagggtgctggagtcccataggggcacttgctgtcaaggtaaaactgctgattttaccaaacgtggttggagatcaggaatacactgatgcatctccatagttaaactgaccactgctagttcatgatatcaggagcgtgggcatctcttttaaacaagatacactttgcacaagggcagcaatattgactgccggttttgcccagaactccaggaaggaggactacagtcccttaaaatgaagcagagcattgagtggaacaactttcaaattgctcagttcaattcatcaagcataaactcagtatgttatgtaccaggaatgaggcggggcccaaggcctaaaaaccattcattcattcattcaacaaacatttttttttaagaatccaccctgtctcgggcaatgcttaagtgcttggaaacacagcagtgaactagccatggataagtcacatcctaaagaaagtcaaactctagttggggagacagaaacataattacagtacagtgtgtcgttgtggagatacgcataagagctcagaggagagaattcccagtggggacactgagctgtatcttaaatgatgcttaagatttcaccaacgttgtaagagtgtccagtgtgagcacaggcatggaggagagagacagcatgctataacagggagcaaccagggcggttgttgctttaacataaacatcaaggtgggagtgctgggatgagaatgggagtgtgtttgagaggctcaggcctgtttgaaggacatgggcagctactagagagatgcatgcagcctcactccttgtgtcactggaggctaggacaccagcccagaagggggcttttgagatggtctagctagccattgtctatcctgtatccagcttcatctagaaatgataggcattgaaatagacagaaccaaccaccaccaatttagaagttcctatgtagtctgaagtctttggacaatgctccccctaagtcagagaagtctttacactttccctctgaatctctatactcttggttttgcatgtctacttaacaagcttatatatcgtaagactcaacaaattatgaggagggataaggggatgaaagtttcccagtagcaatgagaaatgacagttgtcagggtgcaaaggaatagcgcaactctacaaaacagacacagggactcaaaaatcaagcaggcctacatgctgtcatccctcatagccattcgtgtttattacttggtcctggtttaccctgaaaagatgggtctgcaacttacaggagcctgctagctttcatttaaggaacaagcacttgctaccagcttgtctctatatataacactacctgtattctcgcaacattgtataatagtctcctcattttgcaaatatagaaattgagacaaacagaagctaagtcagttgactcaggctataaagccagcaaacggtacaggcaaaatttaaacttagttcaaatgacctaaagccaacactcattttactatactataccacctcctaggagaaaggtgtgcatgatatattttggtgacatttttatccaaaaataaataaataaataaataaataaataaataaataaataaataaaagaaatgtcactgctcaaaggggaaatggttggtgtctggaaatgtctggctgcttttcctctcaaggctctagagcattgagggtgggtgtagactcagtttctggaattatttccagactgtttcttgagcatttgactagaaggggaagtgactaaccaatgccacccagcacgaatttcaggacaactggaaggacagaagtggaaatatcacaatggatttcagttatcttgaccttcattcaccttgaactctgggcagtaggatgttatatgagaggtagttgaccactaggtcatgcaacaaatatttattgaacacttagtatgtttagggaagtgagctaagcaatagggatacagtaaggaacaagatagccacacctctgtcctcttgaggctccagtaaattgtttgtgagtgaggcagggaggtgggacattaagcaaacacacaaacaaacaaaatcatgaaattagcaaaaaaagtgtcactgaacagaacttggtctgtttgcccatgcacaatagaaagccaaactctgaagtactgtgtttttgtagagagaaaagtttattgcaaggctgctgaacaaggagacaggagtcaggcttttggaggcggggacaggttttataggcagaaggtaatggcgtgatctgattggacatttgcaatgtcgtgatgtgggagacttgatctgactggatcatgtcatgaggtgatgctattgaatcatggatcatgccatgtggtgttcacttattaaactatccccattccttagtccaagcacctaggtcccaccaatggtgtcatgcctggtgcatctggtgtgctcggcttatgtttcttgcaacccaggggtattgagctgcttctgcagttccactgtaagatgatatgaaaccactaggtacattgactgtagtgattgagagaagcggtagactggctggacagatgagcaccacccaggaaagcagagcagtgtgcagttgtgtgagttggggaggtgaaggatggagaaaacaatatggacactctatgatcccaggactcaaagaactcactagatgcactgggttaaggatgcttcgaataaattttacagttaatagttttctgaattagttttctgaattgttcctttacttccattgtattatctgatcctcacctacctggtgagtcagctggttgggaaataccatctccattttggagcaggaaactgaagtctaagatgttaactgattggcccaagcttgtggggcttgttacagttaaagacagtgcatagacctagtatcctggctctgagttcatggctcccctgggaagttctgagttcctctgcctggtatgtcacgtgatgaccgggtggcccttttgtgggggtgctacggagtaaacctccaccaaccagggcatgaggggtgggcaagaggaattctcaggggtcctccaactctgccttgtgtgagcccggtctatcacttgtgagcttcagtgggtccctctttgagtggagctgtgtgttctcaaacagactcacacagaaactttggccttcagaccccactcaggcaggctcttctttctgccagtgatgctccaaccctggctgagccaaactctagcccctgctttgccacttactgctcctctgaagccctgtggatctgactctatctggtagaactgagtgtgcaggggggcgagatgtggcagggaggactgttgctgtgtggggctcccgcaccctcatccctccagccaaaccacctcagcagcttggcctatttttctaacactccacaatggagatttattgcttttgtattgctttcctcaggccttcaaagatttattggtttttaagtgacagaatcccagaattgcttaaaagatcaatcaaatagtgactagaatctaatattcagttctggcttgaacatgccgagccttcttcccccacgccccacctgtcacactgatgtgtgactgatccgtactaaccttcataagaaagtaacttagccatgaattagtcacctataatgcagtccctgaagtgaggctgggggcagagccccaggttctataacagaccgtcccctgatccctgaagacttccttggaaatgttctttccccctcattcctccccttcccatctaattagtcatggagactggtcctctggacttcagaacctgggccaagctctctcttcttctcccacattggcactttccagcctcatcctgtggacctgcacccgccaggatatgcttgctggagtgcttgctgcagcttctcatccttcaatccaccccccactgaactgctggagtgatcctttggaagcacaaattggatcaagttaactttcctgcttaaaattcttaaatgggtcattggttttccattgcattaagtacaggcttcttagcatggaattcaaggctcatcagaatctgtccttagccttgtttccggtttcctttcatttccgtctgcccctttaccaggttttactcaacagtgacctatatagttccttcatagttctttcctgagcctttaattgtgttatacagctgttcatatatatatattttttgttttgttttctgttgtttctacatacccctctataggctgtgagctccaagaaatctgaaggcttggtactactgaattccctttacatgggatagtgtctggcatcatacatatatatacacacacacacacacacacacacacacacacacacatatatatgtatgtatatatatgtgtgtgtgtgtatagtaactagttttatatatatatgtatatctatagtaactagttttatatatatgtgtatatctatagtaactagttttatatatatatgtatatctatagtaactagttttatatatatatgtatatctatagtaactagttttatatatatatgtgtgtgtgtgtgtgtgtgtgtgtgtatatatgccttcagctacctcttattctgaaaagagtgctgttcaatagaattttctgcagttacagaaatgtcctatatgtgtgctgtgtggtatgactgccactgaacacatatggccattgagcaccagatatatggctagtacaactaggaaactgatgtttaaaatttttattttaattaatttaaatttcaggagccatatgtggctactgactgccattttggatggtaaaggtctacaggaaagacaatcagaaaaagaaaaggtgccaatgagcctgtgtttggccagcttgttcagaagtttccatgagagttcagtagagaggcagcccttggtagaatggtgagctcagaagctgggagggcttcctggaggcagtgttgcttaaattgagacctagggaatgaggaggagttagtgaagaagggaagagtgtaacctagaagaaagagcagcctatgcaaaagcgcacacagagaaggtacagggtgtgtttggggagccacaagtagctcagtgcgtggggacagagagatgaggagagaagcaaaggagcaggcagggtccaggtgaagaaggtcttcactctggatttagactttgttcagaagggagtgtggaacattgggaaggtgagtgcccaactgtttgtccttctctgagcaaacaggcccctagtccatgctgttctctccaccaagcatgccattctccacctctccaacatccggttcacattggccacatccaggaccatctccactcttgcagcagaatgcaccagctccttctgagttgccactctgtcatggtcatccctctgtcagtgccttgcgttgtcagcctctgctagactgtggcctccctgagggcagagatgggtcccatacggagctcctcactcagacctaagaccattatgctcttcctgccatagctgacttcccagttggatacactgaaacaggagtggctcctaaaatcagaccagtcttatccaattgtcccactgggtatactggaagcaggtacttattttctctgaaccgtaagttgcttgtcggtaaatgggaatacctacatcacagattgttttgaaggtcgaataagctaaactgtgtaaattgcaactggtaattgttcaacatgctctttgggggctgggcctgatggctcatgtctgtaatcccagcactttgggaggctaaggcaggcagatcacctgaggacaggaattcaaaaccagcctggccaacatggtgtaaacccatctctatgaaaaatacaaaaatgcgttgggtgtggtggcaggtacctgtaattccagctagttgagaggctgaggcactagaatcacttgaacccagtaggcagaggttgcagtgagctgagatcacaccactgcactccagcctgggtgacagagcgagactccgtctcaaaacaaaacagaaacatagtccttgtgtttggccaagctgttgaggcaaagagtggctctaagccatgggcagccatgggcaagaattttctctgagccctgctgcaagccaatgcctatctgctgtgtatcctccagcactcatgtgagatctactacatgcgaagtgctggccagtgtagggcacatcaggaaacctacactcatctccaggggtgatcttcaaaacaacattaccttaaaaataggaaagacaatcagaaaaagaaagtgcctatgagtctgtgaacttggtcagatatgagcacctttccgaaatataaattcaagcagacaagcttgtagtatctcattgccaaagggccagcacagtcggggttaagagcaacacccttgggagacagttacattgttcagataagaaatgaaggtgacccaccactagagtacttatgacgatgagatacaacttgtaagaggtaaaatggacatggcttgtgatgacttctccaaggggcagggtgttggggtgtgaaggaaaagacattgtccagcatgactcccagttttctggcttggttcgtgggatggaaagtggtgccattctctgagccaatagatgccgagggagggaagagtctatgaggacatttcatccaggaaaggcgaatggtggcaaaggtggtctgggaactgaatgggggagttaggaactcagctgagcaaggacagctgcaacctggcgtgtggtctaggagagtgtgggggacttctaagggaccttttacaaggtcagttaggacatgagacctgctttcttaggttgcttgaggcatggtgcacagggtgtgggaattctagcctggaggaccaggggtatgaaagatggaaccctagaagacagtgtaacaagatatatacttctaaaggtcattgcaagttctcttcacctcctgatgagaatctgtgatccttttgcatttgacaggtgcagttagttaagaccatagattctgaactgcacagtgattagctacagtaccaattggagatacagcctacttttaaagaaagaagaaactttattgggaagaaaagcaaacgattgccagatttccttcaggattcctttaataactgtgaagcccagagtgggagcacatgaaacaatcacagaggggttttgctggtccatgaagccgcagtgagcaaaattggaatcattaccgtctgattctcagataccagcatatgatggtgtccaattaggaaagagaaacgaacatttagaggatttattgacacagggcagcctgaggagtttgtgaggccttgtccacattgggaaagatgagaaactgtaattacatttagacactctttctccaaacctcatttattcacttagttccccagttctctgggccacctttgctgggacctgatgatgaggaatgctatgggtcccactttggtgtattgggggttagggggacatggataagagatacccagacataacctgggagaagacgtagctttgttaacaccacttttagccatgcctaaaatcacgctgggacttcatcacaccagattgggaaataggagaagccagatatatgaagaggtaaccagaaataaagaataagggatgaatgttactgtagtgcccttctccatgaggttgtcccacagtctacatatgccaaccattgggatacatattgaagggttatgtgtgtaccaccaaagacatcaccctaggagacaaaggtcagtctggtgatatagcacagagctgcaattagatgattgttcaggaaaacaaaagggaagaaaggtgacacccaaataatgtaggtgggtttgcattcacttcagcttttaccctgactgcatttcaggtccccttttataaggctccttcctccaccaacaactcagcttaccaagaattggctctggtgttaggattctggattatattacttaggctccaaccaaggaggaaaaacaggtgtttggggaagaatattttaaatggagcagtcgatggaacatgaagatcgaaagagtgttctattttggactgtctgccatctggagagatggagacagggactgttactggcatgagggaaagaagagtggttgtcatgctcacctcctaccatagggactatttaaattccaaaagtctggagtgctggagaggcatctgagcaggggttttagatttgggagtcattagcatccaggtggtatttcaagtatggaggggagtggatgacctcatcctgggagagtgtagattagaagagatgagaaacagaacagagagctacgaaactttatcaaggaaacacacaggagatggagaaggactggccaaagaggtagaaggaaaaccagggctgtatatttcattttgacttttcttttcttttaaaacaagaaattcaagggaagaatcgtttaatttttttttaatcgtttaatcttctccaggagcttcaagaagctcttgtagtagaaaagaagaaagacacacaagttgatccaggactacagagaaatgaagatgatggataatgtcaacaaaagtgctggaaaatggaccatctggtgtaggcttgctttaaaaagaatgtgaaggttgctgttcagaaaatagatatattgagggccaggcaacctggatgctgttgaagaatttgtgcagagggtacaaagcagggagagtgtagaaagacaggaagtgctatttggagaataagatgatcaaatataaggtgtcagtaataaaactcttctataggatatgatggctctcggtgtgaccacattggcagtgatggtgaacagacagtaatagattcaaggtgaaggtcattggagccaaatgttgcaaggaacacgaggccagactaaggatggaggggcagtccaagtagatgtagttcttataatacaaaccctccaaccctggggaactggtgaaactccttgaaagaactcggtgaccttgcaagatgccttctcctggtccttactttttctctaacttttttttctgctgacttttacttctcccactgttctgggccccatgagagtttgcatcgctgctttgtctcagatcttgcacagctgataaccgatggctctcggtctctgtccgcaactgcccaaaggtcagactttcaagtctgcttccatcaagtgcatttctatagcctgatctattgatgttcttctgagttagagcatggctctgtgccatgttagaatccaaggaggtttgctcttatccaaaaagcattctgcacgatgcctgctccagctgttgagggctgctcagggagttgcctccacttggcaacagtgagagaagtgattctgaaagccctggctttttggtaggaaaataacatcttaaagttagagtctccaccaatgggccaaaaaaatgtgtggttactctctcagaatacaattcacccttttcttacctggctacagctgcttagggtttgctatttagtgcatttccacttaggtataggcttacgaagaattttataaacatataagtattcatgcccagagcaagatgtagcacccccagtaacaactgcaagaatcgagggctagactttagacttacactgtccaatacagtaactatcattaatagctacatgtggctatttaaatttaagctagttaaaattaagtaaaattaaagcttcagttcattggttgcattagccacatctcaagtacccaatagccacaagtagctagtggctgacatactggacggcatttccatcatgacagaaaattctattttactacattgctctagaccctaagaaggttggtaagaagaggtcaaggcccatgtttggtttcagagaggttatttggcaggcgtttggggagagaggtaaaggccagggatcctatcataagagatgagcaatgtaatgaagacttagacagaggtataggtcctgaaaacagcgtgggacctatggctgggcttacttactgtggagattctgatctaccgagctagacttctaaaatttccccacatcacttccactggatatagaatgtgggaagtggtataatcccaaggtttccaaactttaatgaacatcataatcagctggggttctaataagcctgcagagtcctgcctgtccccaaggactataggataatgcctgagaatctgcattttgaacaatttcccaggtgacctactggtcttggaccacgcttgagtactactggtgtggcctatgggtggcctcaggtatggagaaaggaacctgtacagggaaccaagtcatctcttctatggcaccaatatttgctcattcttgtgatatagggaagcaatagttttgccttgttctgtgaagttgcccctgttgagtttacagcttttggatctctcatgtctctctcagtgtgtgtttcagcatgaggataaccagttttagctcctaaaagctgaactagaatctctgccagcttatttctctatccctgtccacgtgggggctaaaaacacacctctgttttcctatgatgatgacaataactggtgtcaaaataattcatgttgtgttgttgcatgctgacagcatatctgaatacggtcacttctatgcggatgttggggactaggtagaagatggatgtttgatgaggctgaatatcagaatatcagaatctgaacaaatctgtgttcttttgtggaaggctagagcagcctgggagaaacaaatccacttccaactttcactctataaaaagttccatattttcttagatcagacaaaatatattgagtgccaaaatgctgcagcaatatgcacgcgtcactcagctgggttggaatctgtatgcattgtccccccgggccagttttgattatgttctttttccttttattgtagtcagcaaatctgaatttgctattgtggggagagcaggaagaagagagaaaaaatgaaggtttttaaccttcagacagttcagaggttcagtctgaataagcacaaaaactttcagtgtgcctctgaattccttgaatttgcagaacttctcagaatcccaagagaactaccttgcacataggattcaggccctgctttgtggctaaaaggcaaagctgaaattatgagagagaaacagagttagaaaaagtaggaagaggaatcaatgttttttttcaaaaaaaggaatttggtcccaatccaggctaagtttcagcctattgttcaatttcttcaattcaaagccatctgcttcccacggctctcagataacgtctcccctgccaggacaccctgttcctgcttaattgaaattagtttccaagaatagttgtccaaagcagtttccaatggtgggaatgttttgaaagtcacaataggagttgaagctttgggatgcagatgttcaaaggcatcacatggtctacaacagccatcatatttccaaagccaggagttctctcattggcctctccaactcacaaatggctcctctgcaactggcaccatctctctatcagggacatgtaatactgcaagtgtgaagggaaacaatcacttccattcaggtttagagcaatgtgtttcccaggcttaattatactgcaggtatataaattacagaaacatgttaatgctcccatgattaaaattatagagtgcctaattgaaaaagcataaactgaattgaagaattcctaattatagtttgctttgaggtgttaatttcctccataacgaatgcataatttcttggaacctaaaaaggtggcctctgcctcagcccataggctccaggcagatggaaaaggtagtcatctttcagttcaggaagctgacacgggaggctctgttcaggtctggaggctgggagagccttagaagggagcttaggaaggaggtggagctggtacagacatcacaccaaggttctactctatttagtaggcatcaggaccaaggcagataaggaacccttattaagcttttccgtcctgcctttgcttttcctctccaaagtctcaaccattttccaagctggtattttgtgcctgtaagacagtaattctcaaagtttggtcccagatcgaatactgatgtattacctgggacttttttagaaatgcaagtgtttaggctctgtccccagccaactaaatcagaaactctaggagtaaagcccagcaatctgtgttttaacatgtcctccaggagatgctcatgtgtgtacagtctgagaagcccagtcctaaggagtgggtcatacacactcaaagtcacatctaactgagctttgttgagctcctcctctagatcagaacctgagatgagaacctgaggataccaagcatcctttcattgactgtacactcacaatacagccctgaagtagaaaaaataatcccctgttctcagtagagaaaactgagatcctgagaagatggcttgctcagctcatagtatcttaggacctgtagctcttgtaggttctgatgcagactcagatgcattatgttacattttttcattgttgtcatataattttcatcaatagctctgctaagaaatgggttttctgacacattgtaagttggaggtcgaactacagcttggaatgacttccaggtgaggcttgactttgctaatggtgagtctaactgtagagccagggaagggggggcttctaaatatctgtaagcattgctattagtggcatcaattgtgagtatgcattcttcctgaagagtgatgcaaactctaagtatgaaagaccatgccacagctcaaaaagaaactcttcagttttgggaaaaaactccccttgcccagtgactgaagtagctgcgaggccccctattaaggactctggaggccacagaaagttgtctagagtagagatatactacatctcctcctctctttagacatccagtttctctcaggtttctatttcctagtctaaacacatcagggactttgtatgtgtgtgtgcagtcagttttagctaatccacagccatctgaaacaataaactcatgttcttggtttatgaaattttgtcagctttttgcgtaattcttagctatttccatatggttgaaaatttgggtcatttccagttttttttgttataaataaccaagcaatcacaaatttattcatgtttttcttttggtattgtacctttaaatagcaaaaatccccaggaatgcaattactgaaatgaaaaaaattgaactacagtgtactgagtgccttctctaatatgccaggcactgacagccaattcatatacattaacctttttcattctttaattaaaaaatctcaaagtaacaaatacacatagttggaaaatcaaatagcccaaccattcccaacaccaccatttacaaccccccctcccccagtcctgtgcctcagaggcaaatgcattttaattctttgctctttcttctgggaattggcaatgtcactacataatgtgctattttaaagttatcgattgcagacattatctatttatttcctgctatgatagatggtaacttgtctgtcttaaatcatccaatacctcccttccttctttccaatgtagttaagccacagttttttgttaaataactacacaatggccaactttacaattccataaaaacaggtcacttcagagccaaatggtatattacttcttttacagtataatataatatgtaagtattatattattacataattaatttaaagcttgctaagattttaagttctttatgtatattaactcagttgattatcgtcaaaaccctaccaggtagaaactagtattatccctattttacagatggggaaactgaagtactgaaaggttaactaacttgctcaagatcatgcagctagtagcagccgatatgaaatttgaacataatggtctagccccacagtctggagtgtactactatgttatactacttctaattactcttcttgtgggcttttttgtttaattcgttatagaatgtacaattattctcatttcttcaggcagtttatttattaaactattcatacatttttcctcccacagaactccatcattttaggtttgcctttaaatactctttttccccttttcttttctgccaatttcttctatttcctaaaacaaaacagaacaactccctcaaaaaaattctcaaatttgtttataattttggcagtcataatttttcattttgagctacttactgttctttgaattttttttcttataacattcacttcttatttatagaagtaatcatttctcaaacatctcaggatattattttgattttggagaagggggaagcttttctgactcctgtattatctctgtttcttctagagtcattttttttaattcactgctctctttcatgttggaagcattgcttacctaaccagtgaacctccatagccaatatttaaaagtaaggtgttgagaaagttgactggaggtgctgtgcttttggaggcggaggcattcaaattctgaaatgaaatcctcttcctatctcctgcctaaggggtagagggcagacacatagctctccatgttcaaaggtttgatggttttgtgtacagacttttgataaacaccccttttcagccccacattttacttccacactgtccacacttgactactccaacatcagaatctctcttgaaatctgtggggcaaataaaatccattcttactcacatgtctttgcaatttgactttctttatctcatcacatgtggtacctctcctctgaccatttttaggtttccagaattttcttaaaactgctcatccactgatgtcccctctcctgtcctctttttccttgtggatttctatgctttttcacatttcactgcaataacagtgaggagatagaagaggtaaatggagtacattaattcttccgcttttaactagaagttcacttacattattgtctattgcagttctcaaataacaaatgatggaggcattattatcgtattcagttcttataaatgctatcatttaaataaattaaggaagatcacataaccagtgagattcagagctaaaattcaagtttaatgctgattcctgagcctatgctctttttacttccaggtcataaaaacatttatgtcttgaaaaccattgccagattattttccccaatttgatgaatcaattaaaaatgctactggaattgtagaatcctaccagttcaaccacagcttcactgaaatggcttgttataatttatgcttacttttactaatttaatgcatttaaatgggaacatattgtcattttgatttgcatgtcttggcttactggcaaggcagaatatttttctaggtatttttatgctattaacatttcttttttgtgaattttctttttacatccttttcctaattacctatggcagtggttctcaaccagcgttaatttgtcccttaagagatatctggcaatgtcaggacatatttttgtttattacaagtcggaggtgatactggcatctagttagtgagtgggggtcagggatcctgctgaacatcccacaatgcacagcacagccagccccctacaacgaagacttatccagcccaaaatgtcagtagtgccaagattgagaaactctgaaccatgggggtcttaatagacttttttttaaaaaaatgtatgattcacaggttcttgatcttttaaatttgaagacccctttacactcttaaaaattaatgaaggcatcaaagaacttttgtttatgtgggttttgtctatcaatgtttactgtattagaaattaaagccaaattcaagccgggcatggtggcttatgcctgtaatcccagcactttgtgaagccaaggtgggcgggtcacttgaggtcaggagatcaagaccagcctggccaacatggtgaaaacccatctgtactaaaaatacaaacattagccaggtgtggtggtgcatgcctgtagttccagctactcagcaggctgaggcagaagaatctagcttgaacgcaggaggcagagattgctctgagccgagattgcacccctgcactgtagcctgggtgacaaagcgagactccatctcaagaaaaggaattaaagccacatgttaacaaatatttaaattcatttaaaaacaatactaagcctggctgggcgcagtggttcacgcctctaatcccagcactttgggagggcgaggtgggtggatcacgaggtcaggagattgagaccattctggccaacatggtgaaaccccgtctccactaaaaatacaaaaattagatgggcatggtggcacctgtgcctgtagtcccagctactcgggaggctgaggcaggagaattgcttgaaccagggagtcagaggttacagtgagccgagatcacaccactgcattccagcctggtaacagagcgagactccatctcaaaaaaactaagcctatacatattaatataaataatatatttttatttccccaaataataaagttagggtgaagagatacagtttcacattttgcaaatcttttttaatgcctagcttagtagaagataattggattatcatatctgtttctgtgtttaatctgtcctcatgaattgttttggttgaaataaagaaaatccagtatcacatagatacataattgggaaaaaaaaggaggaatattttaatagccatttaagatcattgtgggtattctcctctcatatgacaccaaaactcagagtggtggtttcctaaagtttagttgcaatgaaatatcagtaaactttttatactcttttacgttaaaatttatatctgtcttgcacttgagtgcattctttgccttacatgattttgcaacgttatgcattggtcatttgaaaaatattcatggatttattttaaaaattccaaatgtttatatatcttgttgtaccatatcaaaatattacatttgctactgtcaccaccaatttcatcattaaaatttttaattattgaagatctttacagttcacagtggcagatacaagttttccaaattctagttttcacttgaaagctgccttatgtctttgacaacaaatactgtcagttttctttacagtgacagagagacttcgtttattctcaaaaaaaaaaaatgttttccacatatacaaatctgaatgaccacagttcgttagtcattctttcaagaattaacaaaaaggtacctcatgaaaaatgtggctagtttagcattcagttcaagcaatcacagaaatattcttttctggccgggcgcagtggctcacacctgtaatcccagcactttgggaagcccaggtgggagaatcaccaggtcaggaaattgagaccatcctggctaacacggtaaaaccctgtctctactaaaaatacaaaaaaattagccaggcgtggtggtgggcacctgtagtctcagctactcgggaggctgaggcaggagaatggcgtgaacccaggaggcagagcttgcagtgagccgagattacgccactgcactccagcctgggtgacagagtgagactccatctcaaaaacaagaaaaaaaatgtttttttcttgaagaaatcatagtacctgaacaagcaggagacatgatttgtgtatactgcccattgtatcacatgaatgtgaaaaagacatggactcaagggttgagatttaataaaattaatgctttttactgcttcatcgaggaccttcttaagtgaaactggcatttttgcttttatagcaagtatgaggtggtgaagaatataatgacaagtacagttgggtaccactgccttgagttctcctgaggcaccagcagtattgcctacctttccagggtcaatattaacaaagtggaaaaaggcaaatgaagtcttagtattactattacaattatgtcagtgttacagaatcattgaatgggtctgaagaactcccaaaggacatctctggaatttggtatatataagaatatcacggtgaacctgttcaaaatttgcattcccaagcctcacactcagaggtctatcatgggaatccagaattcacaggcaattctgttgttggatggatgagaacctccaattctctgtgcatacacgattttcacctcattgcacttctgcaatcctcaacagtaggttacgtcttcccataagaagaatatttcaactggtgttataatttttctcttgcatttatttgccctatctggcaaataagtatgcctgctattacgattaatttaatgcttaattagtaattattccatttacatttttagagcttagaagggctttttgaagataattgatttcagatggtattatatttaaaaaaaaaaaactgttcagagagatttcacctgatactttcctttccttaagcaaatgtctttgttgcaaggggagacatccaggcgccctactgattactcttttaaaaacaataacatcttcctctgtaaaagcattgctgtgggttctaatcgccaagttaggagctgaatccccatggaagctagtcttgtttaacttgattttttttatttgctcctctcaccatgtaaggtaactttagaaaacgacatttcaactgagaacttgacaggagtataaagggggttgcttcccaggatgtctgaggtttgagaggcccggggtaaagaaaacagcctggctctccactagggtacagaaaatgattcagaatgtatattagaaaacaaaacaaaacaaaaaccagcaagctttccagtcccctaatgtgttctgtttcacattactgcttttcaaaatttaatgtgcaaatgaaataagttgggacctcttaaagtacacattctaatttaatagagctgaggtggggcctgggactctgcatttccaacacatttctttttaggtgatgaagatgctactggtctgtgactacacaggagcagggcccctgcagcattctgcttgttcttgcttctgttggttagcactgtttgctttgaatgctctatttgttaagtataacaataataaaaaacaagtttattatttgtagagatggggtctcactatgttgcccaggctggagagcagtggcgtgatcatagctcactgcagcatcaaacttgatccttccaaagcagtgggatcacaggcatgagacactgtgcctggcctacatagactacatagacttgcttaaagttattgtttaattgagttattaacataagctaatagagctgttggctagtggatattttaattattttttatttattttatttttttgagatggagtctcattctgtcacccaggctggagtgcagtggcgtgatcctggctcactgtaacctctgcctcccatgttcaattgattatcctgcctcaccctcccaagcagctgggactgcagacatgtgcccctaccacgcccagctaatttttttgtatttttaatggagatggagtttcacgatgttggcgaggctagtgttgaactcccgatctcaggtgatccgcccacctcagcctcccaaagtgctgggattacaggcatgagccaccgctcccagccagttattttaagctgagtcaaatatcttttatacattactggattcttgactgattgaaattatacttttcaacatgtacttagaaaatagcacttctggagtcaagtagggatgggatctatttcgtaaacattgaatagtcaacaatgcccagctgggtagagagtattaggcatagattatgccatgtcgttcatgtggataaatccatccatcaattaaaaatatgatactacagctattttgtaacatattaaattaaaaaaatattttcaaagtattttcatattcctatctttgatccttatcacaatactaaggtaattcatacaatgttatcattttattttaaatgatgtttaagttagagtcaccacaaaataatgcatgcttatatagaaatgataggaaaatttttaaaatactgacatttgggaaattttccctatttttagtcaccaaattaaaaaaaataggctttatgtaaggttgatcctccctgataatgttgcatccttcttttgccacatatcatgatagctattaccattttaatgatgtttggggagtatttattcttttgtttctccaagtagttgacagatttcctccacaccgtttattgaatactccttccagtcttactgaacggtgatgttgcctgtgtgtgtgtgtgtgtgtgtgtgtgtgtgtgtgtgtgtgtgtgtgtgtgtgccactatattcttggtttatactgttccattagatctgcctctctgttggtcactgtgtctgtatcacccattttaatatagctttacaaaacattttaatatctagtcttcctatttcttgttgttcaaaatgttcttggctatttttacccacttatgtttccctatgaatttttaaatccctttatcatattctctaaacaatccccaatggaattggtctaaattatattaagactattgcttaatctaaaatgactatatgtattaacgtgagcttttccacactgaaagagggcaagcctatctattcatctgagtcttgactatttctcaggacgtaggcattgactctcatgtagactccatccatagctaccttgttaaaattgttttactaacattaagcttgtggtgtcttctgctatctgtcccctattgtgtttgctaactggtttttgctggtatttagggaaactgtgtgagagagtgtgtgtgtggtgtgtgtgttttcttcatctcattcactgaaacctcttgtgagtttctttaattaagttttattatcttggtttaccagctaataatcacaccatctatgaataatgataattttatgtcctcctattacagttgcaatagctcttgttttggttttatgttttgttgctttgggtagagctttccgggcaacgttgccaaataatattaatagctgaactttttgtctaaattccaacctcaaacactagacctccagcaaatttctcttacgtataatgttagttgtagatttgaaataggtattttgaaatctgaaaaggaaaactatttatattctatagtttatctttatgactcttttaaaatgagtgattttatcaagtgcctttttggtatctacttatatgatcgtacttttcttttttctacttggatttatttatgtgatattttcctagattttctattactaaatctgtcttgtgtacctgcagtaaatgatccacttatggagcaccaatttaatagtatgttagaggaatagtttgtaacaatttgagatgcttttcctctttttctgtctgatgtaattgtttctatgacatgggaattatccattcctggaagattgaaagaactcattggaaaagccatctggctctagtgttgtttattctaattttctctttatggaatgcttaattaatttattgtcattcttttttgtttagtaacaaaggcttttcagatgctgaaaacaggtttggtcctgtcccataagcattaaacattattgttctcacagtaatagtttctaaagagcaggaaattgtggctttgattttctatttgatatgagaattacttataaggcatcatataaggtaagttcctattttccccagttggaggttttcatttgtgcagaattttgatttagcaatttctggttctatcccattatatatacagaatatagactatacctttattcagataatttattgatttttatgtgtgtcctttgtcatttttatccgctgtacctgatatgatttttaaaatattaaaatattgcttccttctctgtcatattttctgggaatagcttttctaattggttgttttattttttattctgttttcagacatttcagatttacatatagacaaatctgtcatttttcttttgtcttttgtaaattgttctattattaagcttaaacaattcttttccactcaagattatctttttctttgatttcaaacctacaggatattgcaagaatgagacaataaccatccacatatccttcccatagatttgccagtcataagcattttgccatatttagtttctctctctttctcttgtctctcaaatggttattcaaccatttgagggttacttgtagtgaccatgacgcttcaaaacctttagtttgtatctcctatggaaaggtcagtctgttacatagccacaaaacaatcatcacgctcaggaaatttcaaagtgacataatgctggtatctaatatataggtcacattcaaatttccccaattctcccaattaattgtcctttaaagctttttaaaattcaatccaggatccaatcaaggatcacacattgtatttggttggcaagggcatactaaaatttttcagtaaataaattaattctgaactattggaatataatgtggtttttcatatgtagcgaggtcttaaatttgatgatttcatctcataattatggaatttctgaaacactaagtgataaaattttctttttcattaatttatgttgcgtgtaattttatacataaaattatatgtttctctctctctgtcatacacacacacacacacacacacacacacacacccctacctagtccatttttatttaactcatactctagtacccatggtttaatcattgtaacttcataatataacttaatatccagtagtggtttttcagcctcattcctttgttgtttttttttttttaagttcttaaccatatttcccatttgaacaaaacaaatcttactggaattgtcaaattatggccatccacatctttagggctcacaaatatcacctaactggctcatattttatacaatttgctttttctcaaagaaaacaatacatcaatttggcaagaattgacatttttacaatatatgatgctttcctccaggatttcagcctttctgtccatttattcatcttcagttcagcacaattatttaacacccactctaccaagccgtgtgctaggggctggagatagtcttttaaatcattcagtagagttttattttccttccaatgtcagtcctatacgtttcttatttgtgttttccttagctatttttaaaggactctattctaaaaggctttttcattacatcttctagcttgttttccatggtgtacagtgtatttatttccatcttctacaaaactactttactgaattcttttattaattttaacagtctttcagttgatttgcttcaatatattaggtctagtcatgttatctgcaaatgacgatgaattgctttcctttctaaaatgtgtatctcttctgttttgtgtcttattgcattggtcacaattattccattttagaggcaagttctagaggtaaagtgactttctcagcatggcagacagagcagcgagtgtgaagccagtactaaaacctccaccttgctttagcaaaggtccccatatcaaggttatctacccaaatattgcctaactggccccatattgatccagccgctttttcccaaaggaaggttgacatttgcagtgcttacagttctctcttaaaaggacctaatctgttaggtgtggtaggtaaaaattaagagggaaagtgtaattggctatattgtggatttcggttgctattttaaataaagtggtcaggacagacttccctggcagaggtgaaaaagtaagccttccttaggttgcctatctccaagggaagaccattcaaggaaggggatagcgagagcaagggccttgaaatgggagcgtgtgtggggtgttcagggaacagcaaagaggccagtgtaactggagaagaattagaagagtaagatcagagagttcttaagagtgagtcttgtagacattgtaaagatgttgcattttactctaagtaaggtcagagccataagggggctttgagcagaggggagtcttgagctgagtcatgtttttaaggagtcattctagccactgttttgagaataaattttgggggcaaaagtgaaagcagggagaccagttgggaggctattacaataatccagttaagagatgatggaagcttagttcagagctgtaactatgaagatgctgagaagcagtcagattctcaatatacagtatattgaaactgaagccatgggaattgcttatggactgaatctatggtattttgaaagagagaagagccatgattgagggaaaacttatttggatgcttcaactggattttcatgattcctttacccaacatattttcttcctctaaatttctacacaaaattcactttcattaaatgtatcaaatgcaattcaatcataggagaagggcccaaataagaaacaaagccactctttggtgtctaattcagtaatattgtaataataatgcatgcagcaattgtgaaggctccagccaactttcatagagcactttctagaatgcacttcctagacatgtaatttcagtctttgcactgccctgtaggttcctcccttcccagaatccttccctggcagagttcttgctgccctcacttcattggattatagtgaacagttcattatttctccactctgagctctaagcacccagtacccagtggccaggttgcattcaaatttgaacctgctatgtttactttattgagctatcatcacccaataaatgtctgatgaataaatgtataaaagacagacagataggacaataggtcgccgaactagtcagaggcaaagcaaagatgcacgtgcactaattctgacactaatctgccgaatgtacacctcctcccattttcttgtctcctctgcgagctattttgactaggcaaatagtgagtaaaaacaggaattcccagagtcttggaagaaaggttggctaactaagacatatcattgtaaatttcagctccatagttctgagtgacctttaagcagggaatgtaattgcaaagctagattctgttgggcattacaaagctcacacttgtttcttagcccatcttatcctataaaaccaatggtttatcatagcattttgtattaaaatttgtgcatacttaaatgccaaagcatagacttttgaagtgtgaaaggacattgaagattattcagtctgtttctcttaacagctttattgaggtataatttacataccataaatttacctatgttaagtgtacaattctttagtaaatgtataggatcgtgcaactatcaccacagtcccattttagaatattttcatcacaccataaaatcccctatgcccatgtacaattgattcctatttccacttccagtcccaggcaattgctaatctgatttctgtctctatggccttgccttttctccataacttaataaatacgaatagaatcatacaatatgtagtcttctacgtcttatttctctcatttagcataatgttttggagcttcatgctgcagattgtagcagtagtttatttcttttgttactgaataatattctattgcatagatataccacatattgtttacccattcaccaattggttgataaacatttggatggtttttatgttttggcgattataaataatgcttctatgaacagtttaattcaagtttttgtgtggaaatgtcttatttcttttggatagataggtagaaatggaataactagatgaatggtacttttatgtttacctttttaaggaactaccagactgtgtctcagagtgactgtaccattttacctttccaacagcaatgtatgatggttccagtttttccacattctttcaaacactggttgtctgtcttttgtctgatggccgttataatgggtgtgtgtgatagtttctcattgttgctgtaatttatattttcttttttttatttttattttattttattattattacactttaagttttagggtacatgtacacaatgtgcaggttagttacatatgtatacatgtgccatgctggtgtgctgtacccattaactcgtcatttagcattaggtgtatctcctaatgctatccctcccctctccccctaccccacaacagtccccagagtgtgatgttccccttcctgtgtccatgtattctcattggttcaattcccacctatgggtgagaacatgcggtgtttggttttttgtccttgcgatagtttgctgagaatgatggtttccagcttcatccatgtccctacaaaggacatgaactcatccattttttatggctgcatagtattccatggtgtatatgtgccacattttcttaatccagtctatcattgttggacatttgggttggttccgagtctttgctattgtgaatagtgccgcaataaacatatgtgtgcatgtgtctttatagcagcatgatttataatcctttgggtatatacccagtaatgggatggctgggtcaaatggtatttctagttctagatccctgaggaatcgccacagtgacttctacaatggttgaactggattacagtcccaccaacagtgtaaaagtgttcctatttctccacatcctctccagcacctgttgtttcctgactttttaatgactgccattttaactggtgtgagatggtatctcattgtggttttgatttgcatttctctgatggccagtgatggtgagcattttttcatgtgttttttggctgcataaatgtcttcttttgagaagtgtctgttcatgtccttcgcccactttttgatggggttgttagtttttttcttgtaaatttgtttgagttcattgtagattctggatattagccctttgtcagatgagtaggctgcaaaaattttctcccattttgtaggttgcctgttcactgtgatggtagtttcttttgctgtgcagaagctctttagtttaattagatcccatttgccaattttggcttttgttgccattgctttggtgttttagacatgaagtccttgcccatgcctatgtcctgaatggtaatgcctaggttttcttctaggttttttatggttttaggtctaacatttaagtctttaatccatcttgaactgatttttgtataaggtgtaaggaagggatccagtttcagctttctacatatggctagccagtttacccagcaccatttattagagagggaatcctttccccattgcttgtttttctcaggtttgtcaaagatcagacagttgtagatatgcggcgttatttctgagggctctgttctgttccattgatctatatctctgttttggtaccagtaccatgctgttttggttactgtagccttgtagtatagtttgaagtcaggtagggtgatgcctccagctttgttcttttggcttaggattgacttggtgatgcgggctcttttttggttccatatgaactttaaagtagttttttccaattctgtgaagaaagtcattggtaacttgatggggatggcattgaatctataaattaccttgggcagtatggccattttcacgatattgattcttcctacccatgagcatggaatgttcttccatttgtttgtatcggagtcttaacatttgttgaaatgttcttccatttatttgagacagagtcttgctctgttacccaggctggagtgcagtggcgtgatctcggctaactgcagctctgccttccgggttcacggcattctcctgcctccgcctcctaagaagctgggactacaggcgcccaccactgcgcctggctaattttttttgtatttttagtagagacggggtttcaccgtggtctcgatctcctgacctcatgatccacccgccttggcctcccaaagtgctgggattacaggcgtgagccaccgcgctcgaccttaaattcttttttttaagaaatacctattgaaaaaccattatgtgtctagtatggtattagaagcaatgaattagatgacaagatctcagacctcatgaagttggcagcctatttgggggcaagcagtaaagccagtaaacaaataattaaataagacatgtttcaattatgataaaagctgtggaagaaataaatcaggagatgtggtgtacaacgactcagaatactggtaattatgtattaatgctttggtgaaattggaatgactcaaatcagtgtgtcttccaagggagtgagaatactggaggggaatgcccctgttggctatacaggtataaatatcagaataaacataagggcaagcgtataaacatcagaatcacctaggtttatgattttgtagctgcacatttaactatctagagagcttttctaaaaagtactgatgctagggtcctacccctagagattctgattcagctgatctgtagtagagccaaggaataagcattctgaaagccctctgggtaattataatatgcagccacaagttgagaactattgatcttgagcaaccctccattgagattctgagatgactgttcactgccctcacttgaagaatcagtgatggagaagccactatgattggtgagagattaccgtatctctcagatgaggagtgctggaaacaaagtttgaaaattaccttgataaaataggtctctgatcctttcacaagtctcatatggtcattgtccaaagctgccctgtcagagccactcttgctggcctcccagacactgtcacctccccttttctgctgtgtgtccgtctcccagcttccatgtgctttgatgtaaatggcttccaggtgtgacctgctgtgggatgttgccattaagatgccagagccgccttgtctgaccctcacacaaagttaggagtgccttagagtttatgtctctctggtgcagacatagccaataactgaccagcactggaggttcaaaagcctttggtttgagatgagacaaatgctgggggtataatttatgctccagagctccctatgagatcaggctaagactgggactttgcctgatatcacacccttgctccacttcctcccattttctctcactcctttactagtttcttctgggactacttcctcaatacatcatttgcagtgaaactttggctcagggtctgtttctggaagaacctgaactcagacatgcctccttctgggagaacgtggactaaaatatgcatctttctgaagttgggcaatctgtacctgtgagctaaagcatacactccatctgtcacctgacttcaactttctgaaaggatacacctcctagctagaaacttttctagatatagaaagagggccacaggaactgttactgatggaaggaggctctgataggtccctggtccccctcagtggaatctggtccgagaatctcaagccaccatttaaaccattagcttagggtccagagggaggaagatggtcaagcagcaggcttttccaaagcctatggagaggttctgagggtttttgccttggatggacagcaggagatactgaaagtaagagtacaaactctccttgaccttacagaagtcaccttagagtgaatgaaattagttgggggcacagtataactcttagatccttgcaataagagatccttggcataagtaatgaaaaaacaggtcataaatgcccatcttctcattggaagaaacagagagggtgtcacaagaggagaaaatgtatgagtaaatgctatgtgctgtgtggtgagtgtcttaggttattcttctctcatgttattgggatttttcctactaaaaaaatcctttctctttaaaaatgattctgaatagattattgcaaccactgtttttgagctggagatatgaccccaaaagggaggtcattcacatttggatatgattttatcattaccagcaagctgaaaagaacatgctcttagataaatgtattctcaagagaatgagaatgaagctattgcaagaaatacaaataatacccaatttcttgtttctttcccccaccctttcctaaaaagtgtcaggaaaggaaagttatacaacttgtgagtgctgtttcttctctccacctcttcaatcagagttctgtggtctttgagagaggctgaatccactggcaaacagatttatctaacaaaatgatttaaatttttctggctgcattgcaggtttgcttttgaatggacaggctgtgaatgcatgggcctgaaggagttgctgggtatattttggcacaataatcacaatcgtatgtgaaccatatgttgactgcacagtttaaaccaaaaaaaaataccctttgctattctttgtaatttcatatggagttggttgggatagagctaagcagtttaggatgccaagttaaaaaaaaatgcttggaagcccctttatacgttttattggtttgtaggaagagaagaaaatagaaaaaaaaaaaaaaaggaaggatactgagctatgaatgaaaagtctgggtttctacttttgctgcagtttgaccctcatgaatcacttgacctctcggcctcagcctcctcatgtgtaatctggcttttgagcttggttgaattgacaagtggatcttcagtaatcagattggtggggagaaagagctgatggggatatacaggctgaccctcacagagatattatggctgtgtctaatagtccttggcagcatttgaatgttcagagcccagtgagaacccatcttcttgcttggccacaactatggaatcttatgctagttgtggacagtaaatgaggacagccatgtggttcctcttgatccatcccatcacgggagggccagagacagtaggaactgattcttggagggggattcagtcccagggaagctcccaaggcttcgggggtctcaatttagaggggaaagatgacagaaggatttaaggtagaatgggaagtctgtctgagaaagcaagacaaaggccttgttatgtagatgtgatcaattcaagcggtgattagggataggctggccctcagaagaaagcagggactcccagctctttccaactcctggtcctggggatgaggctattggttccttctaatctgctgaagaggatatgaggactgctttggttgcatgctcccaaatccaatgcagtgttcttaggtctgttgttagcttcagcaggagagcccaagaggttgtctgcttcatgaagctcttttgtgtttgccctttccctcacagatcagagtcccacaagtaatggaccctcaactggtcgagctactattagcattcaagccagattcaaagatttacctgaatatattgttatttataaagcagtgcaggtcctgaaaactctgttacaaacacccctccacttctgccctgcaacctctaggtttgggtattaggtccttgtgctatttttcagtgactgctttgagcttagctgtcctgataaacataggaattgtacagttgagaaggaccccagagttgaggaggaagtgattattgaaatcataatttaatttaaacgtttattgacttcaacaggcattatgaacatgcatagatggtgcacacccacacacaaactttggattgttaacaccttctcagatgttacacacacttatttagaagtctaaacactcaggttagccacgttcatctgaatgttatatttactcatttggagttagatgcccaggtaatacagatcctcacttggaaatggtacaccctcagatgtagtgtgcatttcttgagagattgtccacatccactcgcatgtcactcacatgcactctgaactgtcaggttcttactcagatgtgtatgtacaacaggcatggtcattgagctgctgtttacctgcactcatctaagtgtggcatatactcatatgcccagcgcttccttttcgcatgcctgaaaattcctatgctcaagaaaattcaggggaaaacttgccatattgagtgtgtcacattttcttagggcagttctccatagccttttttccttaatgaaatagtcctgtgtctctgtcatctcccaagttgtactccttaatcaagtgtctttagatggatagtctgattgaaggatggtagcctgcaacacgtttcatttttgataaaccacatgctggttcactatgccctgtttaaatgattggtttggggtcccctactgcaaccacctcattaattcacagaagtctccagtgggtactctttgggcaatcgatcttctgttttagatcatgagtcccagagatctgtgcaataaagctcttctaaaagaagagcatttattccagagaactataaactgtggggcattcaaagagattgaaaaatgttctccaacttacaaaccttaaaagaacttttacaaagagagtctaacattgggtatcagttgatattcaataaaggatcagtcatctctattcacacactagcatcttcttacatccttctaacttgaagggaacaatatgagatcactagacaggaactcaaggcaatcgctgtttatccgattagggtttctgcatccaggcagatttggtttcatgtttgctttcaattttaattcaatccaatttaattcatttgaacaagcattcattgatcacttgttgggtgacaggcatcctgctgggcagtatggggtgggggtggagaatgaggcagagataagtaagcaacaatgcctactttgtaaaaggtcacaatctagccagtgaaagagtagtcccatctcatgatattggaaaacaaagcagatggagattagatgagctctaggggaactaaagagggaggtaattcatccagactggacatatctggacaggcttcatagaggaagtgaaagacatgctcagcctttggaggaaaccagaggtggccaggatgcagggcattgcaggtagaggaagcataagtcagtaatgcatgaggtgagatccaaaagatgtctgtgcaatagcatggggtctggagtagctggaagatgggaacaccatgagaagaccttctaaatggaagacagaaggcaggcacagaggacttcaaatgccaagattaggagttcagattgtataatttggacaatggaaggcctatgaaagtgtttgaagagctatatgattaggaagccatatgattaggatgagtgattaataaatcaagtgccttagaggcaaagagactagttgaatctgggtaagtgggaaagtgtccaaccaaggcattatcagtggaaggagaaaagagaggtggggcagatgcaaacctgcagaagccaaatcaacagacttctgtaaggctgttgattaggatgaggagtgagaacgaaggagttaagaactgaggatgagccctagattcagattctggccacttgtcagatgctgctaccatttactaagaaaggaaatgtagaaggaggagcagacaggtttgtaggggttggggctaagttgagttttagatgtgtctagtgtgagctggctctgagacagctaagtggaggtaaagttctacaacgtggtaggtttgaaaatctgatgctcaggactggagttttgttgtagaccgaaccaatgcttccacataggagaagttgggttgacaccattagagctaacaagctcattcttccagaaagttgctcaaccatctgtgtctcctctttcctgtccagtgtttatcagctggttgtcaaggaggagcgacttcagaagtcacggagggcagctgacattattgagtgcttttcggtgcccgtgagctatcggaatgcctccagcctcgattctctacactactttgctgctgagttgaagcctgccaacctgcctgtcacccagccatttacagtgggtgacaataagacatacaatggctactggaaccctcctctctctcccctgaaaagctacagcatctacttccaggcactcagcaaagccaatggagtaagtatggccacatggaggccattccttgccttgtttgcattttttcattctcaaatgataagtcagcagggctctagagcagaggatgaaaaactaaggcccgtggggcaaatcctacctcatgcctttaaattaaaaaaataatagtacagctatgcctgttcatttacatactgtctatggctgttttgatgcttaacagtaaagttgaacagttgtaacagagactatatgctccacaaagcctaagatatttattatatggctttttacataaaacctttgcacactcctgtattaaagtaaagagatggtgctttacttgaggaaattacatgacctctctgatccttaagttcttcatatataataataatatctatcaatttgctatctaggaatgcactaatcatggtttagttgattagtgattaatacgccctttttcattgccattggtcacattagaaaatagtgtttctccaaaaacaaggtaaccatttttttttttttttttttttttttttttgagacggagcctcgctctgtcgcccaggccggactgcggactgcagtggcgcaatctcggctcactgcaagctccgcttcccgggttcacgcaaggtaaccatttttgtgtcaaatatttctttggtcaaggattggcaccagtcataatattagaaaatcacagggctggaaagcatatcaaaggtcattcaacaatctcaaacacacacaaaacaatggttctatccatactacaacaccaattaactggcattagtgcttattcttgaatacctccaatgacagagaactcatttatctctgaggtagctttactgttttctggagtagggagtgggctgtgtctctaaggaggctttttaatgtacttactgaaatatttcctattgaagtttctatccattgttcttgattcacactcttagcatcctacaaaaccaatgcaaccaccttcttggtttatagtctttcagttacataagatcttttctaacacccttttcttctctatataaatgtgcccataagattgtcttttctgcaagctaaatatctttagcctgttttattacacaagtttgtattttccatcaaggtggtcatattttcatatttcttttcttttcttttcttttctttctttttttttttttttttttgacacagtctcactctgttgcccaggctggagtgcagtggtgcgatcttggctcactgcaagctccacctcccaggttcacgctcttctcctgcctcagcctcccgagtagctgggactacaggtgcccaccaccacacccagctaatttttttgtatttttggtagagacggggttttaccgtgttagccaggatggtctcggtctcctgacctcgtgatctgcccacctcagcctcccaaagtgctgggattacaggcgtgagccaccgtgcccagccccaaagtggtcatatttcttttaacaaacaccaacaaatgctaagccctacagttcatattaagtttatgtagtatgtaccctccaagagcttatagaaatgtaagggagtctgtcatgtgccttgttatgcagtgtataacatggagaactgagaagcttgctggagaagggaagcctgagacagaagcaagatttggtgaagtgtgtggggaacagcctgggcaggctctgggtggccaagattgagagtttaatctgtcaatggcagtcagtgcttggtgagaaacccggattgaggaactaattaacatttagaatgtccacatacccatttaaattccactgtggtatttcagttctgcatttattactggttcaagcaacactcctcacagagagcataagactacaaagagaagctgccagactgccttccacctgtccatctggtcttcccgctgcatgaagcactctgatgtattgagcaggaagacataaaaattggcagaagcatctgggactcatcttgttctcggttctcggcatcccacactggccagtttatcagttcagcacaaccctctaagaaggtgtggctttccctgctcttggcacatatcaaaagttgtggttgggtttccatgatgagatgggaaagaagtagctttactttattcttcccactaagatactcagaaaacctagaaatagagcatggctatagaacccgggaaaccaacaaatgcacatcagaaggaatgtcctcaccataagagtggttggccctgagccaaccacagaggttttgttacaggaaaggggtcctgatccagactccaagagagggttcttggatctcgtgtgagaaagaattcagggtaagtccgtatagtgaagtgaaagcaagtttattaagaaggtaaatgaacaaaagaatggctacttcatagacagagcatccctgagggctgctgtttgtccatttttatggctattccttgatatgctaaacaagggtggattattcatgcctcccctttttagaccatatagggtaacttcctgacattgccatggcatttgtaaactgtcctgatgatggtgggagtgtagcagtgaggtctaccagaggtcactctcatggccatcttagttttggtggattttagccagcttctttactgtaagctgtttttatagcaaggtctttgtggcctgtatcttgtaccgacttcctatctcatcctgtgagttagaatgccttaaccatctgggaatgcatctcagtaggtctcagcctcattttacccaggtcctatttaagatggagttgctcaggttcaaatgcctccgacagtttgctccccaaacatcatatcagagacctccctcttcaagactcagggatttgccatagaggaaaaaaaaaaaaaaaaaaaaggatctcactctgaaactgcctcatctcagaagcagttttgacactgcttcagaaatgaacaaggccatttaattacctgtgccttctattccacaccatgcatatgtactcttgctttgtaactaagattcccagtaacgaaacacaggcaggaatggaattggatgagtgcttatgccacatgtcttgcgggtgcacttgacctcacaggaacagacaggggaaaagcaatgggagctgggcactcagaaggctgtacttttctggcaaaggaaaaactacacactgtttcaaatgactgtctttagtattaaattttactgagaagagttgggtgaaagggtcattgaagcagaacagccattctcagtctaacaaatctctgcctggtccctctcaaatttttccatatcataaagggcagcagacaatgatgttaagcctggaggatttttgaggagaaagtgttataatccacaaattctttatcagccaagttgttgttcgtgtgcaaatacatcagaaagccattctcggtatccaggggctcccacgttccctgcttctaataaatcattcacagagcaattgactgagcaattaatcaaaataaagaaatcaagaattgagaaatgtggaatacgaagacctacagtgagcataaaactaattaaacatagcattaatgctcaataatggctctaagtgtgttacaaaatggaaggttaatgtaaaatgtaactacttaaggcaaagatgcataatgtaaaaacttaacagttctaatctggatctataattcactattttatcaacaaaaactaagacaaagttggaagatggatgaatgtaaataaaaatctgctcattttctcatgttagacaagagggaatacataattactgttttatttctgatactgagaatactaaaaagtatagttcttttaaacaaagtcagctctccaatctatacttaaaaagctgagaaacaacagtcaacgaagaaaaatgaagaaaataaagaaaactataagtaaacatgaaaatcaaaactataaaaaaagccagaagatgaaagcactagatttgatatggggtggcgggggggtaaaaaagtgttgttttgctccattgtgaaagagaaagaaaacagcttaggtcaaagaaaaatcagaattacccatatttctgtcactaaaagattaaagacaaaggatgagatagagttatattaacctcaagtgaaaggaaagcagaaatgggcatttgttgcaggatggttgtgagccaggtggaataatttactatcagcaaatttcattgctccctactctacctgcaagttttagtcaaggaagggtaggagaattctgaggtctggacatctttgttctacggatgttaaggatggtttgtcaggttaacagagtggctatgaattcaacctttactatcagactgcctaggtacaaaaccctagtagctgtgtgactttcagtaaactactaaaataattagatatgatggattaattaaggaaacatctgtcaagcacatgcaatatgtcaaaaaaggcatttttctgagtgctgagaatgcagcagtgagtcaagcaaagatccctgatctcatcgtgttttcattctagtgggggagagaacaaaaataaataagtgaaataatgtatcgaataatgaatccttaggtttcacattaggaatgtggaagtcagtcattaaatgtttactattatcagcatgaggataaagacattttatagactctttgttgatctgtgaatatgaagtattttaatccagccatgtgaacaccatgcagagttcaagtgtggcatgcactataagatatgttgctcagggttcttgcaggcattttcatgacacaagagttgttcacaggcacttgtgttgggaattttgttccaattagtaatctcacatttatccattgatgccttcttacagataaaaatgtagtcccatttgtcctggcacactgtctttggtgcctaattcacaacacctgtctcttatgaattagaccatgttgtaaccatttgttttggatatagcaatattatagaactatagcatcatagagtaggaaggactttgaagtgtcatctagtctagacgagaagccaaaaaaaaaatctccaataaagcattcttagcaacacattgtattgcttcagcttgatcaatgcaaattgctggagtgaaagggagttgattcctttgtggagcaggtaaaattgttaaagcttttttcccatatagagctaaattctgtctccttgactctccccttgtagccacttgtattggtttgaacaaatcaaaacgttctttcctttgttagcctttcagagaaaataagacagtaccaactaccctcctctggccactcaagttatttctcattgataattaacatgctattacttcttttatttttcacatggcataatttctgggtatccttcatcctacttacccttttctctgataggctcattttccccatcatgttctcctcaaaaagagttgcccagaacctatcactgttcttcagatatggttcagacatgcctgctagattttaactaagcctcgtgtcttgaacctttcctaagacattatttctcaaacattccaacatgtttttcactttggggtcttaattcagggtgcattttacctacatctgtcttttcttcactgtttgcagagctagtaccttctcatttttcaggcctgagtttcaatctcacatctccagagaagagtccaaccatattacctaagaaccacccaccagcactcactcatatgttaacccactatctttctatattacactagatatatatgtattttatttgcacatgttgttgggtactgcatgcctcccacagcatgctgagagctccaagagtgatgaattgtggttggtgtgtttgggttttttgtttttttagctgctatatcctccatgctgagtgtactatttaacacataatagacacctaataatcatttgatggattaatgaaagaatgagactatgaactgtttcttgttgtctatgaatctgtttcctcacttataaattgaaatagtaatatatacttcacacagtctgtttgaggattaaataagaaaaagatattgaataatgaaaagcaccaagtaggtgtcagtacagtctgaatttccattcagcgtagaatgagagatgttgtttgagccattttcaccatagataaaagagtcctaaaggaccttttttctccatcatagtagtaagatttttttccccagatgtctcatttcccaagctccaggctcctgggcagccttgatttcctccaaatcctccaaatggtacccagggtagctgtctcagttctaaacagcgggtgggtgcagtttcgcattgtttgtttcacactcttcccagaatgaggtctgctgaatctactgttctctgcatcctcaccaccattagccgtaattgtgaagttgaaaggaccataattaacggttggatgcaaaacaagtgtggcaaactcatgcaaatatccatcagaagccaccttttgttgggcaatgctgttatgcatgttctatttatgcagaggataaaagtcttttcttgtcatatcctttccatcatgtaggggtacatttaacctggatgatgcctctgccaaatgctaagctaaataagagaagtgggaagtagcagggtgattgttctctctctcctacttcctcctccagttcttgaactcaattgcctcttgagagcacttggaaaccagatgctgtgttgaattggtcatgatgcttgcagtataatcacgttataatagtggggattatctaggtagagctaggttagggaaaattctgtgtctctgaatgaattgggagaaattatattcacttgtgtccaaccactgttaaagaaatggttgcacatggatgggttttctgtggcatgatagagtggaaagaactgagagttgagcatcagacagacttggctttgaattttggctgctctcagctatgtgaacttgaacagtttacttaacatctcaagatggaaaatatgattaatgatctgcctcaaaaaaatcgggagagagtaaattagacaatgtatattaaagtatcttatcgcattacagttggactatttgttcttttttcttttggctgctttccagaggctcctcttctgagggggaagagggttggagcatccttacctggcatataccgatttgtccagtaaactccacatagaagcacacaccttcctaactttggaggactttaggacttgtgtctgtgtcccagctgatgaccgccttgactcacccatgactcaccccaggctgtattcctcttagtttaacttctcatacatggttttgtcactggaaaggggtccggatccagaccccaagagaggattcttggttcttgtggaagaaagaattctaggcaagtccacgcaagtttattaggaaagttaaggaataaaataatggctgctccatagacagagcagcagtatgagctgctggttggccatttttgtggttatttcttaatgatatgctaaaaaaaaaggggtggattattcatgagttttctgggaaaggggtgggcaattcccggaactgagggttcctcccactttcagaacatataggctaacttcttgatgttgtcatagcacttataaactgtcatggtgccggtagaagtggcttttagcatgctgatgcattataattcgcatataatgagcaggagaatgaccagccgtcacttttgtcaccatcttgcttttggtgggatttggccggcttctttactgcaacctgtttcatcaacaacatcttcatgacctgtatctcatgccaacctcctgtttcttcctgtgacttagaatgcctaacctcctgagaatacagcccagtaggtctcagccttattttacccagcccctattcaagatggagttgctctggttcaaaggtctctgacagtttcaagcctgatatctgttcctgttgagtcttttggcacaattgatcttatcttttggttatgatattgccctttctaccccatttcttatttctcgtgttagttcagtgactgttcgcatgtccttatgaaaacctcagatagacatggaatgagaagctgtagatataagctctagagggttcgagttaagatcatcaggagatcacatggcagtttgggtcttggataccccatcaggaagtttatttgaaaactcctatattggttaagataagctaaattattctgtagtaacaacaacaaaatctcactggatcacttctgctatatatttgaaatgggtcagcagagggtctctgcttgttgcaggcagagactcaggccaacagaatgtccatcttgacaccaccaccaagtctgagaaagaaaaatgtggcaaatagagcattcgttctacaagtttccatacaaagtggtgcatagcattttcacattccactggccaaggctaaccacatggccacacttaatttcagaaagaataaggcagtgccttctatatgcctaggagaactggaatatttgagaacttccccaatgactaccacaattttccatgatgactaagcctccccttcatattcttataatacccagacttgctcctgaagcacctgggcagttcataccacaaatcctgaggaatttcaattgcttgagcatctgctgtgtctcagatattaagcaaggtgctttcacctatgctgcttccttgattggtctcacaaagtgactacattttttcagtagatggacgaacacctagaggcccctggaatcccatggggtctcagttacttcacactgaaggagggattttagtaacagcttttcccctttacctccatggaggaatggtaaagaaatgcctgaaactcaatgtgctgctgttccaccctgaaaagcaacggtcttccaatgcttctataactcagcagaccttagacctgtaccacccatcggtagctgagccaaggcaacagagagctgtgacccagaggcccccacgtaaccgtttgctgacttgtcactatagtctatgtaaggaatcgattcctggattttattagctctgcagagccctgttgaagtggagaggaagactgaactagacactttgattccaggattatcatcacaacctttccattactccttaggaaaatctcaatcgggtaaacatccactcacagctcttgtctgtcaccagagcctaggttccatgccccatttatctgcctagaactctttcccagtcctcagtggactccatctcctggggcttacccactcacttgggcatccctgcttccaggcctccattccattgtttgagccttaaaactctaaacccctgctggagctctgttggggcccagacttctctccttaggtaagatagaaattccccaagtgtcaccttgtacagataccaagatgagctctcccaggttgctaatttattttttcatccacttacagtttctacagattttattatcatggtatgagacctgagggagcaagaacattttccttcccatgcaaatatactttaaattcatttggaaagggagatgaaggttacccaaatgttgacagctgataatcttgtcagcctgggccttcagggataaatgctccagactccagtcccaacaaagttcatggaaatagcagcctcagtttctatatagcagcatctctgcctccatcaggcccctacaatgtaaggaacctcgtgaagcttggactgattgccctcagatggtgaaaaagtagagaaacttctgaatttggaaatggtatccatgggttttagaactggcttttccgtttcttagctccatagacagaatacttgcctgccaaacctcagtttcccctctgtcaaacagggatgagatgtgtccttcaagctcactaggacctttgtaacaagtaaatggtaggcgtgataactctttgcaaaggacctttcaggtaaaggtatacttgctaaaacacacacacacacatacacgcacacacacacgtgcacacacatgttaaaactgatactcaattcagttattggaaaactttgaagtatctttggtggaaacacttgggtatgtgaatctaaatttttaactgtaaattttatgaaatttatatacagaacaagaattcagcatatgtgcatatacacataaatattttagcatgcatatatatagatgtatgtgtatatatgagtatgtatgtatacatgttcaattaaaattttttttttttacttttattttattttttgagacagagtcacactctgttgcccaggctagattgcagtggcatgatctcagctcactacaacctctgcctcccaggttcgagtgattctcctgcctcagcctcccaagtagctgggactacaggcatgcatcaacatgcctggctaatttttgtatttttagcagagatgggttttcaccatgttgaccaagctggtctcgaactgctgacctcaagcaatcctcctgcctcagcctcccaaagtgctgggattacaagcaggagccactgcaccaggccctaaaataaaaagtttaaattagtctaagaatcttatagtggaataaagagtaatcattgcaccagaggcctagtataggtggttagcgcagggtacactatctgtatctcctgagcttcctcgaagccaaggaaaaaaagagcaggtggcaggtttgcatagcttctcttacttgaaggaagcatacatatttttcatgaaagacactaagagggtgatttatcacatatatccttgtataagaagccctgagttgatgctggtcaatgtcatcagaacatttttgctcaaacactcaattagtccctcttatatcaatcctatgaaatctgaggttaaaatataaaaagttaatggagacatttgcactcacggattctatttcttgcactataaaatggcattaatgctattaaataagattagtgaatttccaagtttgtttcacctcagcatttttgattaatatgtctagcatggggtctttcctgttgcatagattgtcactgaccagctacatgaccttaggcaagtgacttaggctctctgagtctcttcttcttttggaaaacattaacacccatagtatcaactttataagaatgtttctaaatattaaataataagatgaataaaacacttatcacggggcttggcatgcaataaacatccaattaatgtcagatattgctattacatatcacaggtgggatagagcatagaggtacactcaggaaagaacaagcagaatccacaggggcagagtttttaaacccatggatcaaatttgaatagagtatgaacatgacgtgggatcagggaattcaggaggaggaaaaaaattagtgaagtccagggtttccagagacggcagctgacacactggctgcctgaaagaaagagagggattgagatgtcaaaggaagtttgggaatgtcgtacttacggagaggcaagtggagaagtgggacaattcttctgcagtccctttcctcctagaggctgaattttcatcaagtgtcatcttttacatcatggtcctcaagtttgcaaacccataaatgcaatttattgggctacacagttgaagagattgacatgaaccatatgtacaagacactgatgaaaatagtaggcaatgattcattcatctccttcaaagttattcctgcatctttcctatcagcaaagtctgggtttcctgctatacatcaccttctatattcagccatcaccaagttctctttgttctacactctgaagctctctctaatccatgcacttttctcatctccagtgccaccatcgtagttctggatagtaacatcttctgcctggacaacctcaacagtctcctaacgcttcttcccacatccacgattgcttgtctcaaacagattctcgaatcacagcaagtgtaaattggcactatatgtattctcatttaacacacaagcaagccaaggctgtgagaggctatgatttgctgaagcatactccagaaacaagagaacgagctggggttgaatctgtgcatgtgaaaaatgcagttaaaagtcctatgcatttactgctccgtttcatgccgagccctagtcccacaagatagcttcatagaggaatatgggtgcactagaaccaggagggtcccaaatcccttatgcactcatatttttcttttcctcccgccaaacatggccagcctaagtccctcagtcaatcttgaaacacctgctggccctgccattaacatcaacaaatagtgaggagctgtactaataacaattatcataataaattggcctttgattacatctgtcacctgagaatttcaaagactttacaaacatcaattagtaattacagctcaatggatctcttacagagcaggaatcattaaggtcagataagagctgcgcagggaagcatgaaggactgctctggtttgggttggtttaaaccagggggttgccagctcctaatagaaagtctaagtccctcttcatgaggtgcagagaaactacatttccaacttctcaattaggggatagtttgtacacagcctcaaagtcctattgttgaggaatgggaagtataaaatgcagtattggaagggagcttattgattgtccagttctcttctttcagcagataaaaggaaactgaagtccagtatggggaagttatttgctcaagatcagagccatggcttaaacccagtctcccacaccccatttgcatttgtttactctgcagaattgtgccttcattggtcatgagctcctctgtaaggagatatgaatgatgatgataaaaccccaaaaacccaccaattatttattatgggcttgttgtgagtcagttgggaatacagataaataagttacagttcctgccctcagcgaacccacaatccagtggagaagacagccatgaagacaaatgtgggcaataaattatcagcaatcccagtggcagaatacctggtgtgttcagctataaacctggaggtagaggggatgaggaggtgcctaggaaaatcttgtagaagaagtgacatttgacttggctattagaaggtaagtggatattttccaggtagacagtggggcagaggaaagtgtatgttttgcaaaggaagcacctgagcagaagccccaaaattggggattccctgatacatttgggaagacaatcccggtgttggttccgggatatggaatgaagcccagagagaggcagatatcaaataatgctgggctttgtatgccatgctaaaatacttggcatttattctgttgaaaacagggaaaagaaaaaaaaattgtcttgcctataatctcaatatcaatttattagaatcataaagtcatgcatatatatttgcatccttaaggcacttgtgctcacaaaattttgtttaccctagagagttgtacagagggtattgctcccattctacagatgagaacactgtaagtcaaaaaaaataaggaatgtacccaatgtcactcatgttgggaaaaacaaaatttgaatgtctcaattttttattgatgacatactccatatgtattgttctcacctttaaaacacacgttgttagctaagaaacgtttcacacatacaaaagtcaagatgataacagactgatctgtatgtgcccgtcactcagcttcaacaatgatcatcaacccatcgtcaaatttgtttttgttccaacttactttctcttccaccaatatgtctaactcctttttttcaaggtagtttcaaatgcacagagatgtttcaagaatagtgtaaagaatgttaataagctctctatacagattccctaattgctaacagtttaccacaatagatttaccatcccattttctctctctccctctcctgttctttctcttcttcccctatttgtctgtttgtctatctatctgtctataaatcacccctttactcctaaatgctttaatgcgcaatttccaacataactacaatacaattaccaggaaattaatgtccacataatactactagcctcagttttgccaattgtctcagtcatatactttttagtaaatttaaacaataacaaaaaaaaacctggtccagggtcacatgttgcctttagttgtcaggtccctttagagttctcatatctgtcttgccttgacttttatgcccttgactcttaaaaattacagaccagttattttttagaatgtccctcaagttgggtttgtctgaggttttctcaagattagattcaagttatgcatttttgtcaggaataccacaaaagtgatgttgcttccttctcaatgtgtcatactaggtggcacatgatatcagtttgttccattactggtgacattaactttgattacttaaactgttgtccattaaggttttctccactataaagctactatttctttgtaatatataagtgttttgtacacacatatttctagactatgtaaaatcttcttcaaactttcatcttttagcatttgctgatattttttgttgaaatcaactattacaaagatgtttgccattaggtatatctcccaatgctatccctcccccttccccccaccccacaacagaccccagagtgtgatgttccccttcctgtgtccatgtgttctcattgttcaattcccacctataagtgagaatatgcggtgtttggttttttgttcttgcgatattttactgagaatgatgatttccaatttcatccatgtaccctaaaacttaaagtataataataataaataataataataataataataatacaaataaaaagatgtttgccaaatgacaattttctaattccatcatttgttccacatttattagtggacatctattccgaggatgagttctcctttctcccctattttcaatgtattaatttatttatattgataaaaatttatagattcttcttttattcagttggttatacttcagtactatcatcatttacttttatgctcaaattgtcccagaattagctagtgtgagccccttcaagatggttcttttgtcattctgaaatgtctccagcagttcttgaaaacttattttctttctgacagaatcttgtgcttcctttgccccagctctggttcctttaaatggggaatggtacttattatagaaactcagacctgggaacgagtgggaatcattgttagtgagtaccactgattctaggctctttgtctatgtatccctctacctgtctatccatctatctttctgtctatttttttttttttttttttttttgagacggagttttgctcttttgcccaggccggagtacaatggcgtgatcttggctcactacaacctctgcctcccaggttcaagtgattctcctgcctcagcctcctgagtagctgggattacaggcaccggccatcatgcccagctaatttttttatttttagtagagacggggtttcaccatgttggccaggctggtctcaaacacctgacctcaggtgatccacctgcctcagcctcccaaagtgttgggattacaggcatgagccgccacacccagcctttagctatctatcataaaaggcaaaagtggccgggtgcggtggctcacgcctgtaatcccagcactttgggagactgaggcaaatggatcatgaggtcaagagatcgagaccattttggccaacatggtgaaaccccatctctactaaaaatacaaaaaattagctgggcgtggtggtgcatgcctgtagtcccagctactcgggaggctgaggcaggagaatcgcttgaaaccagaaggcggaggctgcagtgagatgagatagcgccactgcactccagcctgggcaacgagagtgaaactgtgtctcaaaaaaaaaaaaaaaaaaaaaaaggcaaaagttcatgatacctccattctagtccaacatcaaggagtttattccagccttcactcttcccatttctgtaattcccttctctgacagtgagaagcttaacttcattattattcatatatttacttattgttcaacatagaatactcaagaagtatttccagaaatattaatcttagcaaaacaaacctactaactagggttcaatatatattttctgttctctcttcagtctaaatatatgcaaaccgttgtgttgaaaattatttggtttattttttttctttcactagaatatggttatgtatttattggaaattaagttaggtttgtttatgactctttgtttttaattttagtttcattttgcccatccctgttgatttcttaatatgtaaaacattataacgtggttctaaaaacattataacgtggttctaaaagcctagctgtacaaacaagtgcatacagaaaagcacatatcacttcttttacatcacctctaccatcccctgttggaaaccaatgtcattaatttcttggcggtttttttttgtgaaaattttgaagtcaatgtatgttatatttccccttcttatagaaaagctaacatactatagatacttgggtatcactttatattatttcataaatgtcttccttattttttttttacagctgcacagtactctttgttttgttttgttttgtttttttgagacagagtcttgctgtgtcaccaggctagagtgcagtggcatgatcttggctcaactgcaacctccccctcctgggttccagccattctcctggctcagcctctcaagtggctgggattaaaggcacccaccaccatgcccagctaatttttgtatttttagtagagacagggtttaaccatgttggccaggatggtctctatctcctgacctcatgatcagcccgcctcagcctcccaaagtgctgggattacaggcgtgagccaccgcgcccggcacagtactctattatgtgattatagctgtttatttggccactctcatgtgtggctatattgttttcaatatctttcagttgcaaatgttgctgcatcaaggaacttgtgcacatatatttttgtattgttgaaggtgcgtcttcagagtgaattcctagaagaggaattgtaggattaaagggtggactaatacacagttttgctagatgtcactaaatttccttccttaagggtaaaaccaacttgcatttgtcccagcaatgtatgactgtttcctcacagccttgtaaacagtttgtgtggtctaactttcatttttgtcacacttacatgtaagaaattatatctcaatatagctttaatttcctttttcttataagtgaaattgctatattctcctatacttaatagccatttttatgtaatttttgaattacctgtttatgtcttttgctcaattttcagtttgttttttactttttctatcaatttttaaagttatttatatatcagagatatcagtactttatctgtgatatatgttgcagttttttccagtttgtgatttatctgttgactttgcttatatttttgccacagcaaataaaatgttgtcagatgaatcattttttttcttttattacatttaaactttgaatcacagttaaaaagttttttcttacactcaggctataaaggaatttacccatgtttgcttctaagtcttatgtattttagtatttttatatttagttttctgatgtttggtctttgtttttgtgtgtgatgtaaattatggatctaatttttatctgttttcccaaatgtctgtctagttgtcttagcaacatgtatttaaaagtccatttttgtcccgataatttgagatgctgcttttctcatattttaaattttcatatgttcttgggtgtttttctggatgtcgtattctatcccaccagtctatgtggctatttacgcagcagccccacactgttataattatgggatctaaactttaatgtctgcgagggaaagttccccatcgagatttcctttttcagtgagtttctagctcttcttgcatgttccctataaattttagtgtccacttgtccagattcataaaaagtctattagtaattctgggattgcgttaaatttatacattaattagagtgaaatgacatctttaagatgttgaattatcttacctgagataagggatgtctttctatttgttcgagtctacattatctttcatgggtgctgtaaagttttctttatacaggttttgtgtgttcttgctattagcaagtatttcatctttgttgccattgtaatggggttttgctacccttatgtcctctgagtattggttttatatatgactactattgactttgtaaatacattatgtttttgggggcatagatgtttatacctattatattctttgttagctgtggattttagcaataaaaagtatcctttgccatgtgtaatacttttttagttgaattcttgttttatatcaggatcactactatatctttattattttttcatttactgtttatagcttatttcattccttcctttttacttttctgaagaaaattattttgttcacctttttttgaaattttttaaatttgtatttttgagggtacatagtaggatatatttatatatttctttgtttatggggtaaatgagacattttgatacaggcatgtgatatgaaataagtacatcattgagaatggggtatccatcccctcaagcatttatcctttgagttacaaacaatccagttacactctgttattttaaaatgtacaaataaattattattgactatgtttgttgtagcactgtttacaataacaatgttttagatgtgacttttatacatagaaggtagttgggtcttgtcttgtaatccaaatgaatatcttctacatttcagtacttgagttaaatcattaacatttggtgatatgactgagatatctcaactctgccatatatttttatgtcataatttactatattaattttataatactttctggtgtgctttctttactcttttattttaaaatttcatttggtatttaggaagtcttgtatttctgttctagtagttacctttgttcttttatattatttaacactttttttttttttttgagacagagtctcgctgtgttacccaggctggagtgcagtggtgtgatctcagctcactgcaaaccgtgcctcccaggttcaagcaattctcctgccttagcttcctgagtagctgggattacaggcacgtgccaccacacccagcttatatttgtatttttagtaaagacggggtttcactgtgttggtcgggctggtctcgaactcctgacctcatgatttgcttgcctcagcctcccaaagtgctgggattacaggcgtaagccagggcacctggcctatttagcactcttaatcccatcttttcttgtttaatcttttgctatctggtttgtcagatttttctggtatccattaactttcacatattgcctatattagttcgttctcacactgctataaagatattacctgagactgggtaatttataaagaaaagatatttgtttgactcacagttccacatggctggggaggcctcaggaaacttacagtcatggcggaaggagaagcaaacatgtccttcacaaggtggcagaagagagacgtgcgaagcaaaggaactagagccccttataaaaccatctgatctcatgaaaactcactatgacaagaatagcatgtgggaaccacccctatgatccaatcacctcccacaaggtccctcccccaacacatggggattacaattcaagatgagatttgggtggagacacaaagccagaccatagcactgcctgtacaacaataaatgacctaatactactcttctctttccctatttcttcctctttctctctctctctctctcaatttttagttgtattatttctgcaatgacagaaaacataacatttatatatcctactttcatccaacccctaccttatttcagtcttagatttacagttaaacatattaaacttttacccatcagtccttttgctgaagtttcctcagtcgtattttttggatgaacttatcttctgtagatccttcaagaaagacaagtacagcatgccctggctttttgaatgttgaaagctacttttccatagctttgctatatgaaaaacacatggctagctatgaagtccttggttaatattaatactttctctgagcttttggaaaatgctgccacattgttttcttgctttgcatgctgtttttgagaagtatcatgatagtctaattctcttgcatgtgtacattattcaatctctttggctttgagagtatttattctaagtttaatagtttactaggctgtgtcttggagttgatcttttcaggtgcattttccccagggtactgtgcactctttcagtatagaggcttgggacttcttttacttccaataatttttcttgggttattgtcataaaatatttacctacctattttgtctctctgctcagaaatttcactatatatatgttggattttctttgccttacttttaaaccactttttcaccaatccttgttaattttttctatatctcatttctgttgtctttgttgggtttctgtctttctttagtgccccttattaaattgctgtttttgacatctggtaatttaatcttcatttctgaggtgatcttttaaaaatttctctcctgagttaaatcaactttctttttattttttcctgatcttttgtatattttggtttttcacttgtgcttctgtaagtcaaagttgtttgaggatatttaattcagtttgtaatattacttctagactgttttcttgttaggggtagattttcatcatttgtggtgttttgacattttctgttttcttcatctagtagctttattaggctctttcaaattttaaaaaattttttagatttaaagtggcttatacgattctcagttcagaaacagtttgttctgactggatagtaaagtacaggtatttttttcagtcgatgattttgtgtgtatgtcatagggaatgggtgtaggttctgactttttgtttttattctagcttttgtgattctaaaaattcccactttgcttccttttttccttcaatctccaatcttccaagagtacttctcccttctttttatctcattttcacccattgaacctatttcacctgttgaacactaccaccttgagtcacatgttctttcaagtccttttcctgtactcttagttttgatctaccaggaattgttttagcactttcatgtgtagtgtggtctttgtctttctggaaagtattttagatcagccatgtactctctgctagcttacctcttttctcttccaaattgtttttacatagctcttgttctccacataggatgacaagggtgattgtgttgaaagctttagagatatttcatttatatctggttcttctttttgtaccaaacaggcctatgacattttaagacttctctatacattaattatgctgaaattgtggattttgtacaattttatttttttcttcttttcctgtgttgtttttgaatcatatgtgggaaaatttggtgttaaatagttaccaatttcttcaactacccagatccaacatgaattaatggttgattgactgtgggaagtcacatatctagaaaaatcaataatgactcctaggttgtttgcttaatcaactaagtagatgatggtgacatttatttaaacatggaaaattagtggtgagtaaggcttggagtgaaaataaaagagaaaacaattcttttagatgattgtatatttgattgtgagtatttcaggtagacagatggatagatgagcctggatctcaggaatatcaatgctagaaaaagtactttgggagtcatgagaacataatattcaaatccttgcaatttattataatctcctaaaaaagttaggatacaaatgatgaaagaggatataaaaccaagctccaggtcactccagtgtgttgaagtcaagtaaaggataaatacataggcaaagaaagggataaagaacaggtagtgaagtaggagaaaagtctggaaggtagaatgacttaaagccaagataattaaacaggtcaaggagggaatggtcagttgcagctaatgttgatgagagattaaggaagatggagttgtagcagtgactatgagtgctgaccatataaaagtcttagtggacttagtgtagtctcactgaagggagttccagagacttggagagttgaggcaatggagtcagcaagtagagataaaacttacaagaagattttcagaggttgggtttgattttaaattttccgaatggcttgcatgctacttgggggcttcctttcttagagtatggctcatggccttggctattgcctcaagtggagcctaatgccttccaggaagatctcataaagttgatagtgaacatttgtccagttagaagtgtctgtaaccaatagccacctatcctgcaacctgaggctgcaccttgccactcactgttggtgactgagggtctgcagaatccagcatacgtgctttctagtgagctagcactcaagtgccccactgcttctgttacccctttaaaggcattcctcatgcattatcctttgaggaggaggctaccacattacgtagtcctaatggttctgagttactcaaggattccagatcttatctgattgttcaaggtcctgcgtcaagtcaaacagaattttgtaatatcacaaaccacttagcctgttttccaaagaaagctgtgccccattgtctttgtgtgcctgcctgcaacccaagaaagcatagcatctgacctcaatgacaaaggggtatttgccttacagacacctcagaaaagaaggccacttgcttgaagtttactttgtattttagcctggcttattatacgtgtaaccttgaaaaatgttatttaatcttgtgagaaaaaaatggacattgtcgtatccacctcacagtcttgttataaggattaaaagacataaactatgctaagtaggtatgagacaagagaatcactggaacccaagaggcagaggttgcaatgagccaagattgagccattgcactccagcctgggcaaaaagagcaaaactctgtttcaaaaagaaaaaagaaaagaggacatcttttaaaaaaaaaaaaaaattcttagtgcttctttcaggtaacaaacatgttaagtgagtgagtcccattggggctaaacaatagcttaagggtcagtgcaatggaagaaagtcaaggagagtcagtttgtgggaaggctagactaaggacccaacgctgtcaataccataagcccaggctgatccgtatgcgtgaggtggggtgggatggtgggagggagctctagagtcaaacagagcaaaaatatgctttccaaaggtagggaaaggttgaggtaggatcactgcagccactcttctggtctaaggcaccaccatctcatcattcgactataccaccaccttcttctcaccaacttgtttctcttgcaccgtaagtctattctctatgtaacagcctctacctttaaaaattttaaacctgaaatttcaattcttcctgcctaaatagctctttaatgacttcctgttgttcttaaaatatagaccaaaactctatagtcccaaaaggtctcctggtcttatgtcgctagcttcgttttacatcatgcctcaggtaattcattatgatgatagccatgccagaattttgtatgtcttcaacagcaccatgcattttcccactttcaggcctttgcatgtctgtgtctgagtctgggatgaccttcctgatgcttcctgtgtctaacttctaaggttaaatggtctttctaaaagcagcagaccatctcccttcccacccacaccccatgccatctcccttacacatgcacagcacctggcacttctcacttactttagtgtactaaacttttaaacacaacctcatttagtttactgtactaaacttaaatatagattgacaaatttttcaccaagtaaatacatacctatgtgtgtttattgcatatctcccagtgtttattgcaacttttaattagatacttgtttgtgagaatggttgtctaatgtttgtctctccccaggtctgcatgctctatgaggacagggaccatgtctactttggttgtatttgtagctccagtacctagcccaatgtgtggcacatagtaatcattcaataaatatctgttgagcagttgaccaaatgagtacatgaacaaaaattaggtagactttcaggatctcagcacagtcttagaggagaattaaggcctgagtcaaagttactggggaaactatggaaagacgctgaggtcaggtctaaattccatcatatcaactgggaagctcagtcttagacaaaataaagacacaagttgggataatgtgaaaactatttgaaaactatgggatcagggttaaatctacatcctattaaatgaggagtctaatagagcagtaaagtaagaattgtatgtattagccaggtacctagggcttcttgatcaggttagcagcctaacccaagtctttctggatgataaacagcagctatgagacatttgatgacctaaacagttccactgtgaactcctcaattgaagaggcatcctaaaatttcagtaaataattgaaggatggatggatggatggttagatgagtcagacttgacctagtgttaaaatggaggctataagtagatacagatatgaggcattttgagtaataaggtaggtaacagcctaccaaaataaataaataaataaataaataaaattatttgcatgaaatgaggtattaggaagtagtatcaagaagactgagtactgaaagtaaaggagtactgccagtagctaaaaccagacgcagcattgaggactggaagcaaccttggtagagtggcctgcctattctaccaaagtggccttttctaccccattctccatcatttgattgatggggaaattgagccacagaaagggacagagagttacccaatattgctgcactggccgagccttgagtagaagcatttctcaacagagcacaacagtaaggacacggtgttctaccccagggtgatttatacctgcatgcagattttaatctggagtgggaagtggagcatgggtgagattaaaatgataaggaaatgaaattatattgtactgtcccagaatatattacaaacctggaattagggtatagtagagatcaaatagaaaatacagcttttttttccattccccagagacttatataatccgagaacaaagaaagtgctcatttctttttgttgaaaagactgggcactttggacataggcacactggccacacctctcctctgataaatatcagagtatccagaatatacctgatttgcttgctgacaatctagtcactcagaaggtcaagagagtgacttagggctttgttattctgtacctaattctgaccaacagagacaaattggttatggaattaaagttgttaggaacttaggagaaaacaaacgttttggcatcacgtttgtcagtcaggaagacttaagcataatcgtatatacactctagatcatagaaaacagactttaaaacgtgtggtgctgaaggggtgattttaggaaatggctcattttcctgcacgaaactgtggaagggaagattaaggaaagttaaaaacttctcacaaatgacacaatgtacaagagaagatagaataaaccactgcactaatttacaatatcatcaacagagtattcccctttctctgcaaccttgccaacatctgttatttttttgactttttaataatagccattctgactggtatgagacagtatcttgttttgatttgcatttctccgatgattaacaatgctgagcattttttcatgtttgttggccacttatacgtcttcttttgagaaatgtctgtttgtgtcctttgcccactttttaatggggctatttgtttttttttcttgctgatttgttaaagtttcttacagattctggatactagtccactgtcagatgcatagtttacaaatattttctcctattctgtaggtttactctgttgatagttttgtttttgtttttcttttgctgtgcagaagctcttcagttaattaggttccaatagtcaattttcgtttgtgttgcatttgcttttgaggtctcagtcataaattatttgcttaggccaatgcccaggagagtatttcgtaggttttcttctaggatttttatagtttgaggtcttacatttaagtctttaatccattttgaattaatttttatatggtgagaggtagtgatccagtttcattcttctgcatatggttacctggttttcccagcatcgttttttgaatcgggtgtcctttctccattgtttatttttttcatctttgttgaagatcagttggttgtaggtgtgtggctttacttctgtccctgtggaaagcagtttggagacttcttaaagaactaaaaacataaccaccatttgacccagaaatcccattactgggtacatacccaaaagaaaagtaaccattctaacaaaaggagacatgcacttgtatgtctatcacagaactattcacaatagcaaagacatggaatcaacctaggtgcccgttagtggtgggttggataaagaaaacatggttcatatactccatggaatactatgcagccataaaaaagaataaaaccatgtcctctgcagcaacatggatgtacctggaagccattatcctaagaaaattagtgcagaaagagaaaatcaaatgccacatgttctgtcttgtaagtgagagctaaacattgggtacacatggacataaagatggaaacaatagacattggggactccacaagtggggaaagagggagagaggcaagggctgaaaaactacatattgggtactatgttcatttgttcactctttgggtgatgggttcaatagaagccctaacctcagcattccataatatattcatgtaacaaacctgcacaccaaccctctgaatcttaaaacaaaacaaaacaaaacaaaaaaactctgcagaattccctttattgtgaccacattttaagagaatattcccacagaaagcaaattaatgttcacatttgcagagaagaagtgaccagaagaagcatgagggaaacttctgaggtgctggcaatgttgagtgttttgatctgggtgctggtcataggtgtgtgtttacttggtgaaaaatttgtcaaactgtatttaagtttagtatactcatctgcatgtatattgcacttcaaattaattgtgcaagaattattaagatttagtctgtttccttcaggatgtattttttaaatgcttaaatttgcatgttgtaacaaaaaaatgtactttgctttatttatttaatattctcttatgtgtatcatcccatgttattacatggccctcacaatcatttttgttaacagctccataatattctactatgtagatagaccccagttttccttttggaattttttctttttatgtttttaacgtatactaattgtaaatatttatgggatacatagtgatgttttgagacatataatgaatagtgatcagatcaaggtaattagcatattcatcattttgaatatttaccatttctttgtgttgggaacattcagtatcctctgtctagctatttgaaactatatattttgcttaactatagtcatcctacagggctacagaacactagaacttattccttctatctaggtataatcttgtatccttcaacaaatctttccctttctctctctccacttcctaacctctagtatctgcttcctgctttttacctctatgagatcaacttattttagtttctgcatatgagtgagaacatgaagtatttaactttctgtttactgcttattttccttaatgtaatgtcctctagttccatttatgttgccacaaatgactggattttattctttttatggctgaatagtactccttgttgtatatataccacattttctttattcatctggttttggacacctagtttgattgcctgtcatggctattgtgaatagtgttgcaataagcatgatgcagatgtctcctcaatatattgatttatcttcctttggataaatgcccagtagtaagattgctggatcatataatagttctatttatagtttttttgaggaacctctgtactgttctccatagtggctgaactagtttacattcccatcaacaatgtataagagttcccttttctgcacatcctcagcagcatttgttattttttttgtaatagccatcttaacaagggtgagatgatacctcattgtagttttaattggcatgtccctgatgattagtgatattgagcattttttatatatttgttggccatttgtatatctccttttgagaaatgcctgttaagatcatttgcccatttttttagttggatttttatttgctgttgaattgtttgagttcctagtatgttgtgaatattaattccctgagggatgaatagtttgcagatactttccttccattttgtaggttgcctttgtactctgtttattgtttacttttctgtacataattttttagttttatataatcccacttgtttatttttgctttctttgcctatatgtttaaggtcttattcataaaatattttcctagatcagtgtcatatgtttggtttcagaccatttcccttatgttttcttctagtagttttatagtttcaagttttacatttatgtctcttatccattttgagttgatttttgtatagggtgagaggtggcggtctagtttcgttcttctgaatatggatgatccattttcttagcaccacttattgaagacactgtcctttccccagtgagtgttcttggtgactttatcaaaaatcagttgactgtagatatgtgcattaattttggcgtttttaaaaatattatttcattggtttatgtgtctgtttttatgccagtaccatgctgtttttgttattacagctttgtagtatattttaaagtctgttagtgtgaaacctctagctttgttctttttgctcaggactgttttggctatttgcggtcttttgagttttcatacaaattttaggacttctttctatttctataatgaatgccattggtattttgatagagattacattcaatctatagattgctttggagagtctgattattttaccaatattaattcttccaatccatgaccatgagatatctttctatttgtttcccttcaatttctttcaacagtatttttggtttttcttgtagaggtcttttacctccttggttaaattgatttctaggtattttattacttttggtagttattataaatgagattgccttattgatttcttttttaggtagtttattgttcatgtatagaaacagtactgatttttgtattttttaggtagtttattcatgtatagaaacattactgatttttgtatgttgattttgtattctgcaactttactgaatttgcttagcagttctaggagtgtttttttggtaaagtttttggtttttcgtatacataagatcatgtcatgtgcagacagagacagtttgacttttttttttccaatttggatgcccttaaatttttctcttgcccagttgctctggctaggacttgcagtgctgtgttgaataagagagaccacagctttctttgccatgcctgtgtggttagacagatatatcgctcatgattttcacttttataaagaacactggaaccaacatcattgaatataaagcttcatttatatttaaagttattccctgagaaaagattcttagatgtctggacagataagactgaatttctttaaagtgaagatacatatttagaaattactctcagcagtattagcctcatcaaacctttgccctctgctctattcaaaaatcatgcacagaactggcaagttttctaatatattactttcaaaatctttttttgttgttgttgcattaccatgaagtggaagatcattctaaccatctatagtctcctggcacctctcccagtctacacaatttctcaatgatagtcattgtgacactgtacaatcatttgcatgtcttcttcagtgttctgggtttcatgctttatttaaccgtctcaagctctttaaaccaaaacacagggtatggtgctattggaatggaagccaacagaagctgaaaacctttgtccaaacatgaaaacagaaatgagtttgctcactttaattgtcatatgcaagatttaacttgtaacttaagctttttgtacatcacatttagagcaatgtcctttactgttactttttttctcagccattttcctttttttttttttcatcttttgggtatgttctctgaaaaaactttgttattgaaatgtaacatgcttcaaattttgtgtgaagattttatatgaatgattcatatacttgaaccatgacttgtcatttttttaacatttccaaattatctactttataaaatgaaataattgtttgttttaaagagagacacttatagtttttatgaagaagaaaacacttgttccgaagaacaagtcatgtcaacccaaccttctttctttaagacagtctttgcactgattggagaaatgcaatagacagagtatcagtgtctaaaaggaatttgaacctattctcaagctcaattcataagcagtttaggatattagcaattagttctgattctgattaacagatgaatatcaacgtggaagaaggaatctagtacatgtcataaggttctaccattggcattatccagattgttacttatattaatgatctggatgaaattaaagaaaaaaatgatttctaaaaattttcagcttgtggagactgtgatgatggcctgtagtacttggatcagttgaagaagatggaaattgtagtggtaaatatgactctgtacttgggtttcaaaaatatagccacacttgtacatgtagaagcaggcttctaaccaatacttttatttttggttgggggagacggataaacaccaggatgttagctatgttaatagaagcccaatataagtaaggataatagtgatagtctagataatcatatatcaatataatcatgtatcaataagagcatgtatagactgctgttttgtgttctagtcaccccacattaataggataaagtggagtttgtcctagaatgagcagctaggatagctcaaaagacttgaactcttataatatgaggaattgataaagaagaatgtttatgagcccgagaaccatctttcattatccagacctcttttttacacaagcaaaagcagactttctgtgcattttgaggaaaagaatcaagactattggcgataactatgagattaattatggggagtcatacttggacgtaatagaagtgatcatttccagcattcagaggtgtacctagatggaatagaatctgccgtagacattgtcatgtcttctctacttctggatacatgggaggattccatttccccatctcactaaaattaggcatggccatgtgtctggttctagccaataaagcacgcatagaagtgaaagtgtcgcttctgattcaaagcatttgattgatactgctttaccctttagcactctctccccttgggttaaaatggacataccagctatgatctctgagtggttacaatggtcagagtgtctcccaatcacccccaatctcaccccttagacccagccacacacctacattggacaggtagtttgaatggaaaataaacctttgctgtttttagccactgaagttcaggggttttattatggcctcctaacctttcctatcctgattgccaccaatcccttcaagatgcaatggttctttgtgaatgagctgcagcaagacaagaattggatgattgacagatttttggttcagcaactcacatacttgcattctttgcattttactttccttgctacactgaattcagactgttgttgggggtataatttagtcaactggaattttcagctggttccaggacctcctgggagatgaatcccagtaaagcgggcagagaattctcttcctaagcacactcttcattaactccactgtgtgcccagcaacatcacacatttatgaatcctttttactttggcaacagctaacaacaactagatagttcacctagcaaagattctattgccacacacattatttatgaaggttgcgaggcccacacaagagctcaggggaaaagtaacttttgaacatgaactttgcagtttgagtttgacatgtttcatatagactggactattgccaagtatctcttcccgtctatgcatgtagatgcattattgctagtaacaaagtttcccaaggatgccctccttccatctgctcactcatgcaactgaacaaagcacattgcataccccaagtacccactacgtgttattgttaaagatgatgagtgctgggaattatctgatatgtttataaagtggttctgtctgggaatgaggtttatgagatggtaggagtcaggaagtgaactgaataacatatgtacctagcctgagaaaaaaattaaaaaatggaattaaaaggtcatccgatggggaaaaaaatggaaagggcaaatttaaaattataattaaaaatacatatgcatgaatatatatgcaaatatatatgtatttttgtctttatataacaattttatataactcacagctaattaattggcatctcatttttgttgttcacaggagaccaaaatcaactgtgttcgtctggctacaaaaggtatgttggcatctgcttgtctgtcttcacctgttcttcagccatttaagtatttctttctagccacacagagaaagattaggcaacagtaactcaaaacaagaaagaattgttattttcaccggagtcatttgcatctagaacatacattctagggtgtatattagtagcacagtgcgtaaaatagagtaaaagtttaaaacatatttactgaatggatggatgggtggatgaatggtgtaaaaggatggactggtactttgatcagtggagtgatggatataaatttactcaaatattcttttgatatatgtttttcttatatttgggtctatgtttatgtgggtattttttaagcatgtctattagacccatctactgagttctgtacttcgttctgttggtacacagctttcaaaaatgaggtgattagtactggggcctttagtaatgagaagacaaacgctgcattattacgtggttggcattttcaacacttatccccaaaactaaggcagcattgttcaggctcatcacttttgttttcctaattataattgaattgcctggctctttcagttggtacatgtttctgtttattactctttttaaaaaacaaaatcaatgaatggtttgctatcgtttaacctattacagggttgaatagttagaaatcagatgtatctttttgttacagagttgatatttttaacagcaaaccctccccatacacacacaacagaactgggcaattctactctgttccctgaatttactggcagcatccatagtttcatagactgcttccaaggagataaaagtggtaaacgtaagtaggcatataaccgtagatttaaagtacagagaaaagcgatgacccaagtatgtatgtgtatgtgtgtaaatatatagacacatgcacaacgacaaaaccacacagaggaacataaacacacacacgggcagagtggggagaaaaagagagaaaaaaatctacagctacttgacgaaatgtgcaccaagacccatcacacatgacttttataactttgaagaaaatcagcccaatatgtaggcacaaaagagaagatgcaggaggaagaagaaaacggaagcactagggctccctgtgataagaagtcaccatgatttcacatgagtcacagagggtgacatgtccctaacttgttccctctcaggaactcaggctcctggatggaaagagataaaatactctctgtgaggcaaggagaattgatggcctgcaaacaaaagtgacacaaatcacagatattggcagacttttccactgaagaaaacagataatgtagaaggaagaacaccatcaattgggtagcactagggctctagacagcaatcgggagagctaggtgtctgcagcctgcttaaataagcagctggagagggaaggaaactcacagagaaagctccttcactatggtatgctctatggctcctcggtggctttcgatttctagaccaggagagatggatgcaatggatttgcactccatggggtaggtgggattctaaggacaccctctgggatgtaagctctattagagggtagctggctgggtcataatttctgaactgagaattggaaacatgagacctgacaagcaataggaacatatggggacagtggaagaatctctaaaactatactctcctgaaaacttcaggactgcagtcctcagagacatagaagcccaccctgctgggcttctctagagttgctttgctgatgtgcaagagaattgcagtgacatttaaagaaccagacagaagagttctctacctctccttagcataagggcttcccctcttgcttgagctttaggttaccatctttccttaagtgaatggagtgtgtatgcaggtaaagtaagcgtgtgtgaaaggataggaatgcatgaatgagtgtgaatgcccagctgtccaagcccaggcaggcttctgagaggtcagggtattgggaaatcagagcatccgcattctggttttccaatttggtgagatccaacacttaaacccaaagaaatgaggctccagtagcacttgggaatggggtagagaactagatagtgcagaatgtcagtcggacacagttcagttatcccctctcaccacatcagataagaaggatgcttggggagcataggacaaagggaagcagacctgtgtttgatgagtgtctacttggtgcctggtactatgcttagagtacctagggttgattaaaggcaaaccctatctattataaatccgtccactgcccgtgaggagtttgtatcaagaacctaaagctgggaatcaatattctgtttatcccatcccttcctgaccacccggatcaaatttcctctaggcagccttcctgaaaacagtattctttttaacacaggaagatactgagaatcccacggactttggaagcatatgaagtcccagagatgggtcaccagtctctcccaaggctcttccctctctctgtcatcacggcagctgcttcatgggtctgatggagggcatccagaccctgaagtccatatgtcagactcaaggccagtactctggtgatgaagcaacttgccgctgtctggtccctgaccctggagagtccagccactgtctatgaccagctacatgaatcccacagaaccagatggttgccagttgtaacagccctaagcactcattcaggatcattctaacttgaccccaagcctagtaccccttacacaagaatattagacacacacctggctccagcatgtgtctccaaccctttcctttgtgtaatgttgctactagtaactctggatctaatttagtaccacccagcttggacggttgcaaagtaatggacctctattagtttcctgtggctgctgtaacaaagtcctacaaattggttggcttaaataacacaaatttattgtctcacagttctggaggtccaaagtctgaaatcaaggtgtctgcagaccttgttccttctgagtgttgtgaggaagaatcttttctacgtgtgtctcttagcttctggtggtttgctggcaaatctttggcatttcttggcttttggaagcgccaccctgatcactgccttaccatcacatgacattctccttgtctgcttgactgtgttcaaaattcccctttttatgaggatactaccacctaatccaataaggatgtttgattagggtagcaaaaagcaagggaatttccttgaatataaaagctaaaagacattttgagcactttgcttgacacactctagacctgggaatcaatctgatcagagccatagagagaaaactgcagccagtgggtaaacaggcattaagtgatggtttggatttaaaactattattcagactctgaaaggaagacaatagaaagccacagagcaaaaaagagcaatttaaaaatcaggttttgttcttatcattaaaataggaaatgttagaaagggcaagtgagcaggggaatcatttagaaccatacctttggaagatgagggatgggctcaacataggtagcaggttgaagatgtcagccacaggtgcttaaggtgatcctttagaaaatggagcatgtggaagcttggggtagggacttagacttcagaggtgctaatgctcaagtagagagaaaatgacccttcccatgagaggtacattatcccatctggtagaagatgccccaggttgcagctgctaaaggaggtacccaggtatctcaattcatgtcctctggctgagacagagcaggccaagggaaaattgtttctgacctagttgttcaattctagaactatattgttcagtccccctttgagaaactgatgcccagttccatccaagttctcttacccactgatgtcctgtctttctaattcttccgtgactcctttcttgtactcatctgttcattttgctacttttccttacccacaggccttgccccaccagtcttgcctgcgtgatctgatcccttcctccctccagcctcctctaagcttctatccttttattctcttattacactctggcacactggtcttctttcagtttttcaggcacatcaaactcctcccaagcttggggccttcgctcatcttgccctctctctgaaatgctttggctactatatatgtctccttaatagataaatatcttaacagagaagtatctttaagatggcctcttaaaccttatgtcctcagaagaccatcctgacctctgttttaatgtatatccctaattttccactctcactaaaccctgtacttttccttcatagcactcatcacaacttgcaaatatatatatatatatatatatatatatatatatatatatatatatatatatatatatatagtctacttacatgtttaatgtctatctccctgctagactctaagtgacgtaagtgcaaagactgtgcttattttgagcactgttttattattcccagatctcagcatatactggtactcaatgaaatgcattggatgaacaaatggatggatggatggatggatggatggatggatggatggatggatggatgagtggatgactaacaggtcattattcttccatggcttcatttttttcaaatgcaagttacatgtcaggattgttctcttaaatggtaggagtaaaagtgacagaggtaaagtgtccactatgggatctgcagtccccactaacaagaaggccagccagcctctgtttctgttcctgctgtgatagagatctctctacccaccatggacttgcttcacactttggacacttccgtttgagagggcttctacattatgagtccaaactggctccctattatttttctgcccatcagtccttgaagtcaaatagattctgtctaccatttctcctttcagaaaatgaaatttgcttcctctgacctgctcctccagccttggttagggtcaggaaggtgcatgcttgcttctttccattgggtggaaccactctggctgccagcaggcagcagcactcccatcttgtctccagcgccagccgtcaagggaacacagctggctctgcagactcccgctgggtgcgcccgagtggcagttagaaaaatcagctttgatttgatttgcaaactgagccgagtcattgagacaaaataaacccagaaacccataaagccatttgcagagttgctttgcagaagacagccacagttttaatctagtaaacactctctaacgatcccattaaaacaacccccttggagtgggtgctgaaagctgaactccagaataatgaagcataggatgaggggccagtgtcaccagtagttttgttctgcttggtggcagcgatggactaacgccattgttccaatagtgacagcaagaggtttgggcgctggcttttgtaaatatgccttcttttcataagagctaagcctgagataaagcatttcatctggcattttcctctccttttcccataatggattctcactcctgcagggaccagcagggacactaaatagccatttttcagtgagatgctctcatttaacagatgctaagactggggcccagaggaggagtgatgtgtccatgccttgtttatccacagaatcacagccacaggtggtgtgataatcctctgctatcaataggcaatgcctactcccattgatacaagcctatgtggaagattctgttttatataggaagcttccttgagaggttgcatggaataattggaaattagaaacacctggattcaaatcctgtcccccaaaatttagctgttagaccttggacaagtcagttaaaatctacgaatctgtcccttcactttgaagcctgagatcggtagccctttctaccaagtattcaagaacattatatatatatatatatatatatatatatatatatatatatatatatatatatatatatatatttccttctttctctcttcctttctgagtctttaatgtgggacttggagacccagacctactaagcacagatcctctctctcagttctctaaggaaaaagccacagcccagactctagtcactgcttgtacagttctacaaatcagccgtttgtcaaatggatacaggttagatccaaagtgaagaaacccagaggggacaggagtgatgttggcctcacttttcagtacttgaccttcccattgataggttgttgtctctagatgagatcctgcagagcaatagtattcttttatggacatgtataggattgtggtcatcccttttctagccttgactatgacactgtcctttcttcatcaccagaccagcaatttcaggagggacccaggagcatagcatgtccaaatctagctagagcaaccagggtaggggccataatggggaatcacttgtgagaggaaagactctagtgagatagtctattggaaagctcttgattgttgttcagtctttataaatcttgtcaaacttttggaggtgaaagctcagactgtgtggctggagggtttgggcaggacaatgctattcttccttagctgagtcccatgagatacattttccaggactgggatcctcagagttacatgagtgtaacaaattctccttgacttgtggccccctttgctctcactgactgtcttctaggtcctaaaatgtcaatggaaaaatacagattttcctaaaggttttgcaagaagttggaggaagagaactatatcataagtacacataagatagcctaaatatgacctttaaatatcccaactctttctttaatatttttcttgctacaacagctggcacatctctctagcctctctagttgtgctcaaacttcccccgccacacacaccccttccataccccacttccataccccactcaggaagacaaaagctggtttgatagagttcagaaaaacaagtgaggattaactcttgccattcaagcatgtaccttgggagttccaatccatctttctcaactagaaataagaattatctactcaagatctgagagacacctgagtcgacttgatcgcaagtctgttattgcaaagcagttgcatcttctaaaggaaaaggggggccttttaaaattgggagtccgggaaggaacacatttggggtaggctagagacaagggttataaataaagagaataaagctctattggatattttaaaccccattgatgggatctcaatgtgatgtttgaggagggattaaaagggatttgcaaaaattaaccacctattgtgtgccagtcacagggctttgtgtgctgacacaaggtttcagtgtgatgacagaagtaaagcctgacacttagcacacactaaataaatagtggtcatcgttattacttaatgatgggccaaatgggctcaaggggttaaataaggagctcaagtttcctcagaattggaaatcagatctgattccattgtgttaatactatagacagatgagattcattgaccactgacaggatgctctgtctcctacctatttgttaacctcttcccatgcctcttttctagtaataattgataatagaatatttagcatgtgatggtctttggcctgtctccaggagtattcaagctaagtcctggagcagaaggtgaggtggctcaagaaatcctcaactttcttcacttccacaacatattgaagctaataaaccaaaaaattagttagtcttcagggttgtctgctccagggccatctgtagcccagcagcatctctctgcactcaacactgattgctttagaagggacaagagtcagaagggaagtctgagacattcagcattctgagctccttctttgcaggctaacacacacacacacacacacacacacacacacacacacacacacacacacacactgtacagggcctggaaacagtaaagagagaagggtaatgaatcctcaaaacgtgatgtggtcaggggaccaggtgatgcaggagaaagcaagagacctctacctcagcaactggattagttaggctaggctaggctttgctaacataacaagctaatacccaactcccagtagcttaataccacaaaggcatatttgttgctgtgccatctagaatatatgtggtctcagagaacccctgagcaggggaagagaaagcatggaagtggcaacttggatcttaaatatgtcactcggaaatgactcatgccacttccacttacatggccttgatgagagctagtcacatgacaacagcccaactgcaagttgactggaactctttcctatgcccaaggatagatggaacagacactggtaaacatgagacatctctagaaccatatatgtaaacaggacctttttctgtttctgcctccttttgtgttttgctgagatccatgatccatcccactatattctgcccaccaactagaaaaatctctccccattcctgcatttatccagctgtccctctgttcctaccccagatagctgagcattactgctaagcacagcatgggttgcagacctagaggatggagtggggaggtacctcctctaggcccaccaacccaactaaggctttaactcttttccatttgatcctcaagatgacttcatgagataattattacctccactttataagtggagaaattaaaatttagaaatgtatgtaattttccaaatgacacagctagtgagtgaaaaatactgaatcagactttcatgtattcatttacttttcagtaagcatttattgagtacaacttagtattgatatgtaatcccacattccctagtggttaaaaacatcatctttagatttggatggtctttgattctaggtaggaaaaggtactaaactattctgtgtctctgtttccccatctataaaccaatgacaataacaccacttatggctgggtgcggtggctcacgcctataattccagcactttgggaggctgaggcgggtggatcacctgaggacaggagttcgagaatagcctggccaacaagaagaaaccccatctccactaaaaatacaaaattagcttggcatggtggtgcatgcctgtaatcccagttactcaggaggttgaggcaggagaatcgcttgaacccaggaggtggaggttgcagtgagccgagatcatgccattgcactccagcctgggcaacaagagtgaaactccatctcaaaaataaataaataagtactaccacttactgcacagggctaatgtaagaatttcatgagaaaatgtatcgaaagtacttaatataatacctggcttgtaagaaacactcagcaaatagtagttcatgggagaggcaatgaataaatataagtccaataagggctgtcgtcaaggcaaaatcaggatgtcactggtgggcaagaagggagacataaatcaacttagggtatgctatttcagaatgtgtgatcactgagataaggtttgaaagaagagtaacaattatcatgtcgaacaaggttgcaaagtaagtcaagaaagccttcaagccaagggagtaggtatgcaaatcactgaaggcaagagagcatgccactgaatttaaatgggacaaggcaaaggaatgatggctagtaggccagtgtgaccagatgaggttaggagtgatcaggggccacccaggactctgtgtagccccactgtatgtgtgtgtgtgtgtgtgtgtgtgtgcgcgcacgtgtgtgtgcacgcatgcgcgcacatataaaagcattgtccttagatagtggagcccctggaggtacttaagcagactgcctttttggggaaggacaccctagttatagtttagaaaatgaatcagagaaggaagactaaggcagggagaaggctacagaatgggagagcagttaagaggctgctgaagggggccaagtgggaacatgtaagtcatctcttctctgaagctttgcatttcttttactgacatgtgagggcgacagtctttgtcttgcctatctgagagcattggggttaaaaaaaaaaccctaaaaaatagccacttagaacaggagttagcaaactcctctgtaaaaggacagatagtaaatattttcagctttgcaggccttatggtctctgtcacaaatactaaagtttgtcattgtagctccaaagcaaccatacatataagaatatgtataagaatgagtgcagctgtgttccaataaaactttgtttatggacactgaaatttgcattttatataatttccatgtgtcacaaaatattactcctctttcatttttttccccaccattagaaaaatgtaaaaagcatttatagctcatggctgcacagaaaacagggagtggggggccagatttggcctacaagtcatagtttgctgacccctgacttagattgtgcttttaaaacagcaaaacttttcatatttttaagggagaagtattatgattactatttactggtggttaaattttatagtatttcatggctgttgatcaagtttgccatctgtattatttttgaaattatgtattttttgtttatcagttggtctggaatactctatcttctcaattttgcataagaacttcctgcagttttgttgatggatcactggagaaagctgcagtccctggacaagcctaaaacacctttcaaccttttgtatgtttttctttagagaggtgaggggtggatttgaaaggacaggaacattaaagccagacaaaccagggtttgaatacaacctttaccagtttgtgaccttgaacaagttttacaaattctatgattcaacatttcttcattcattcttcatttattcaacaaatattcactgagtacctactatgtgtcaggcacaatgcaaggccacatgagtacactagtaaatgggacaccgtgtctgctttcaaggagactacagatttaagagaaggcatccatttctaatacagtgatatattgcaataagaagggaagatgagggtgttatgggaagacaagaaggggcatctgtcccagattcactgacgtactaaagactccctagaggtaacaggttataaactgacacctgacggatgaacagttatcagccaggtgaaggagcaggagggagtatatcccatgcaaagtgactcacctaaggaaggcttacatacaagaaggtggggggctgttgataatggaaagctgttgtcatgcttgggacagggtgggcagtggtagtgaagagagacaagaccagaggggtgggcaggagattcatcatggagggcctgtgagctgagtgaggtggtttgaagtttaccttggggacaacgaggcagcactgttgtatttcaactgaaggatggagagtaagactgaaggggaacaagactggaggcagagagaccagacgacaggctgcttaaataatccatgtgaaacacaaggttggcttgaacaaagtgagaatgaaattaaagagaaggaagcagcttcaagagcttttctggggtagaattaataaagcatggtgattgattataagagggacatcagaaaaaaggagggctcccatgtgtctagactgagaagctacatggatggtggcaccatttatgcagaaagggaagtctaacagagaagtagtttcggtggaaaaatgacagatttatttatagtcatactgacctttctgggttattctaaatcttagaaacattatatgtgaggcacccagaaaagtacctggcatgtcgtgggtgcttgataagtggtgcctcttactcttgtttcattttttttaaatctatttcaggccctgttttgttaaatcatgatgttcttttgctatttagtgtgagctcttcagagccacaagaattgcagttttgttcaccgtgctgcacgttttcatgtgtgtttctttctctccttctcttctgcatgctgcctggggactggcttccttgtggtcagcaccaatgggcagcgcccaggtgaccccggggactccactctgcctcctcaccacaggtgatcaccagagccctgggcgggtgggaggggagagttgcccacactcagtgggtcctccaggccaggtgcaccagagaggaatcagcagtctttccaccccacccacccacccacccccccacccattcacccatcaacccacacattcattcatccacccatccctccatccctctatgcatacactcatctatccactcacctattcattccttctactaatgcttactaagtacctactgggtgccaggcactgttctaggcatggagatgtacaatgatgagcaaaagaagatatgttccagtgcctttccaggagaagaaacagccactggtccaaaaactacacaaataaatttgccacttcaagtggtgttacaaaggaaaggtacatggtattcaaaataaacaaacccatgtgcagccaaaggagtgcttcacaggggaagcgacagctgagctgtgatctaagtttgggaaaaaagttgacataacaattctgtgcttaggaaatgagaagctctcactatgatcaggtctaccatttgtcctgacaatttacccataccatgatcagcctgacttttcctacctgttaaataggaataatcccacctaccccttatggggcaccatttacgttgtagaccgtacacatgcagaggcctctgagactaaacaagataatagacatcgaaggagctgccatgggtacgcccagtccagagtctgtatttgtttgaagtgaataccagcccctttcctcaagtgtaccataggtggagttcatttcacataaatgtatgccattcttcaaaggacacagagcccactcatgtcagaggttgatgtccatcgtggggctcaaaagataatctgctgacctagagacctctttattacagggtccctttttagtcaatgggaagtttcttggagatttcaaacctttaactgtcacctctctcaaagtccttgcccagacaatggcctccggtctactaatccctgaacggtcagtttatcatggtggagaaggaggtgcagcaggctgtgatgacatgagtctgggcatccagtaccttcacagttcactcctgccaccctgtttcccaaactcagagacatcactgctggtgaatgtcttaggttgagttccctggacactgagactgagatggagattcttgtgcaaattattcattgcagagtgttctcagaagaaagggaggaagatgagatatggcagagaacaaagctaaggggggatgtggagatctgcatctacctgagccctgggtaaaggggaggtctggagtaggaaatgtactaaagagttgggcccaccttgaggcaagggggccaatatttgtaccatggtgttggtcagccactggctgtgggctgccatgggaatgcatgacctcctggggaagtggttcccttatgcctgatggtacttctctaggaagggaggtatttgtgagccatttgcgccagcacccacagcagctggagagtagtcacacccgcccagtaaaggagattggggctgagcctaaacagcatccactatgggcaagttttatctctgcctttgtactgccatggacacctgtactccagtgtgtcactgccaacaccacaggaatttcatctcagccactccctgttagattaccttaagcaagttgcatagccttatttcacgtgcaaaactaattatcatatgtgcttcatgcagtcatattaaaaattccattagaaaatgctaggaatgttgtgtgcagttgcagcacatagtaggtctttactgaaatcagtccccagccctaccttatcagaggcccttcccaaagggaggtgggagttgcagatggacagtgggagaaaagtgactctcgtcactgtgcacaccaccaatttacagagaaacaatacttctccagagtgtgtgcgagctgttccgtttctgctgggccattgttctctaggctctattccagtcgagcagtcagataatattttctttaaacagagccagtcccatatcaggtgcttttgttcttacctcttgtcttctaaggcgtctgaatgttcctcctctgacaggtttatttcattgtgatccatttatttccacacgtttctcaacctcatttgatgggtgaggtgcctgtgagtgccatccctttcaaagggtgtttttgttaatgttcgtcccctggtagcaataatggctgatgtaaataataactgcctgggtctgagtgatggggatattagactttaagcacaggagcctcttttcatatcagcaccaactcagagagctgcaggaccacattatgtagcagggacaggctggcattcggagtgagtggaggctgagttcagctctcagcaatgccaccttctgggctggtgatcctggataatttatttttcttttccagacttcattatttttatttggagaaattgaaatatgaatagccacagtcataggtaatcatgagaactaagtgcaataaaagctttaacttctttgcccatctaggtccaattagttcttcaggtcttcctaatttattggctaatccttcaaggaattcattctctatggcaagattgctcaaccccagcaccatggatgtctggggccagatagttctttgttgggggccggtggcagggggctgtcctgtgcactgtaggatgcttagcaacatccctgcctctccccactggatgccagcagcacgtcaaccccaattgtaacaaccaagtacatctccagacattcccaaatgtgccatggagacaaaaatcatcctctgttataaacctccagagccatactgtttaatagaaatagaatttgaatattgtatgtaattttaaatttcttagagtcacgtgagaaaagtaaaaagaaacaggtgaagctaattttaataatataatgtatctaactcaatacggatccttctcaacttatgatggggttatgtcccaataaatgtaccataagttgaaaatgttgtaagttgaaaatgcacttaatacaattaacctacggaacatcatagcttaacctagcctactttaaatgtgccatgctcaaaacacttacattagcctgaagttgggcaaaatcatttaacacaaagcctattttatattaaagtgttgagtatctcatgtaatttatggaatactgtactgaaagtgaaaagcagaatgtttgcactggtacttaaagtgtagtctctgctgaacaggtattactttctcagcagcattgtaaagtcaaagaatcttaagcccacctatcttaggttcacaatcatctggtatatccaaaatattattattattatatgcagcaaaattaaagaaaacaacagatgaaagatattttacattctttttttgtactaagtctttggtgtgtattttacacatagaacacttcaataaaataaatttttaaattcagttcctcagttacaccagccacctttcaagtgctctaagtacgtgacttggtgactaccattgtgggcagtgcagatcaagaggtaacacatctagggtcatctttgtccctagttggtgaatagaaatgtatgtgtagagaagaggctcagtaaatattcagttccttttattccttgttgctctctaggactaggggacgtttggcaaaatctggagatgtatttggttgtcacagctgggtgcgaggggctatagtcacctagtgggtagaggtcaggaatgtttatattgagaaaaataaggtaaaatcctcttctggccaggattgggcacttttctgcagtgagctgactggaggctgcagtagagaagtgaccagttaattaacattaagagaactcagtcttccccaggcccaccagtgcagaaagaaggcctcttttcacatccctcctgcagttcagccaggcctcaagggggtggcctggacttctgagcccaagaggagactgacagtgtccagtctggaggccagagtagctgtgctaaaggtcatccccagtggcagatctgacttcattgtcttggccatgccccatgcccattgtcaattttctacagaaaaaagagctgtgggacaagccctcatctggagcccaaactccattccttaaaactggggaccttgagccaattactcagcctttcgcctttctgagcctcaccttcttcatttgtgaaatagtacagttgagtccctgtacagccaggcctaatcatggtgagggtcaacagaagaaatggatgcactctcaacccagctccaggtttgagaagatattggatacagcttcccttattattcctttatttcctgtgtacctcatgttaaaactctctcttattatttcgctggaaattctttaaatcacggccttggcacagtgacaggattcaggtcatcatacactctctgggagttcttagcaactgtccttaaagcaactttcccaggggcagctttactcagacccaggcagaaggagtttgagcctttgggagaaagctatgtgggccaagagaagatgatgaagcaaggcagcagtctccctagggtcatgccctgggccctgtgagcttggacaccctgaggcttcagtgaccctccaagggagcatgtgcccagtggaaggggttgacagatggtgtgagaacaggaaccagaggcaggagaaccgggtgaagctccaacctgaacagccaccatgaggggaaaatgcttcatggagagaggcgaagacaggcagcagaggcaggggcacagcctgtcaggagagagggggcagctctgggggacaaagcattgggaatgtccaataagacgatgaaaagaaaaatataacagcaagtatgttacatacttcctacatgctatggaatgtgctgagtttcacatcattaactcatttaaacttcccagcaactctgccaaatagagtactgttagtagtcacagtttacagatgaggaaactgagggtcagatgattaaaaatcactcaactctgaaatgatgaaactagaattcaaacccaggtctctcaagacagtctgtaatcatactctccatgctctgtgcccatagacattagagaacacccattctgagccagcattgggaaataccatggcaggatggttcaggacagtctcagaagccacataatttactatctgagaggctttgagccccaaagtttccccattttcttatctgcaaaatggaaatactaaaaatgaccagttattgagaagaatcatgagataaaaaacttcattatcttagacttgtgccatcattataatgatcttaacccatcttacagatgaggaaattgaggtccagagagtgagcagcaggcaagctgaccattggtaagattcaggcagactgaatctgggccagactgtgactggtgactgggccagaactgtggtttctgagaaacgtgagtggtggaggaaataggtaagagcccatcagggcctcaggcctggggcacctaaagtgccaaatagaagtcatgaatcagggctcatcaaagctttaggatataaggtggatggctgggcacagcagcacagcaaccccagctcctgcagtgacccaaggcaagagcaagactgagagctgagataggtgaaaggatgtggacatccctgagcctttgacctgggcatcctctagttccccttgaccagtgctttggttggttctggagtgcacaaaggtcatggctgtgccagaagactaggggaagagctacagctggaggccacgagggcaggtgacatccaggagccaggctgatcattgcagaggaccctcctcagctgttctgggcaactactcatatggctgtaaggctgacactacagaatgggggaggagacgagccttggatcaagtgcattaggatactgtccttaacaacagtcttagaacagatgctcaaagcttgacagacacaaggctattggtacatcatttgagctgccattttctgttgcccgtctccccactgaatcaaaagacttaatgcagaagagggttgtcacatccctgtagggtgttctgtgggagatgattgttaatgtttgtgcttcttcaaaacaaatgtctaatcagggagcatatatgactgaggctctcactgcacctttttctctcctgggatattctccttaaagcaaggagaaatcagtctccagtcttccattcaaactgccattaaactcagattcagaagccaagcatcatccttgccttctctttttcctcatcttcagtatccaatttatcactaaatctgatagatacggcctctgaaatctctcctgaatctctgtctccttcttgctcactgctacaactcatgtctgggactcataaggttagtgtcacagattccaaattggggtccccatgtctttacatcaatccccttccaatatttattccccactgaagccagagtgatcatctaaaaataagagtatgattcaggccaggtatggtggctccacacccataatcccagcactttgggaggctgagtcagtgaattgtttgagcccaggagttcgagatcagcctaggcaatatagtgagaccatgtctctacgaaagtaaagttaaaaaaaaaaaaaaaggcccggcgcagtggctcatgtctataatcccagccctttgggaggccaaggtgggcggatcatgaggtcaggagttctagaccagcctgaccaacatggtgaaaccccgtctctactaaaaatacaaaaattagccaggtgtggtggcacgcacctgtaattccatgtactcaggaggctgaggcaggagaatcacttgaagccgggaggtggaggttgcagcgagccgagatcatgccactgcactgcaccctgggtgacagagcaagactccgtctcaaaaaaaaaaaaaaaaaaaaaaaaaagccaggcatggcagcgcatgcctgtggccctaactgaggtgggaagatcgcttgagcccaggaggttgaggctaaagtgagccatgttcatgccactgcactccagtctgggtgacaaagcaagacccagtctcaaaaaaaagaaaagaaaagaaaaaagagagagagtctaatcctgattaaaatgctcccagggctccccttgtgctttgggataactagcctgaatcaaaggccatttaccacctagtgcctatcccttttttatctctccaattttatttcctcctcagcatcctgtaacccgttcaaactgatcatgtgagtggtacttgccttctcacactctcctctctctgctgagatgttctccctctatggtttgccttactcatcctctaggatcaagttcagacagtttgatctctgcaaaacctttactggcccccattatctccagattgcatgcagagatagtcaactgggtgggccacttggcacaaagaactgcaaccccctcccccgccctaagcaaagttttctattgaacatggcatatgtacaaggtataagcatgttttgttggagctgtttggtttctatcaactctttccctgtgcctagcacacattgtagtgctcattcatttgaccccatgcatgaatgatttaataaataagcagatgactgacattgatggagcatgtgccaggcatggtatactcacccccatccccacttctgcctccagcctgtgatggttcaagcacctcactctactcaccatctaccattttgttgggctaattgtgagtcactagttttcaatccagtatttgaactccatgcagactcacctgccaagcttcctagagactgagtcttcagagcccttgtttggagctcccccaaatctgctggagctggtcttgctgagcccagtgtctcgcctgggatctcatggtgttggcccaaaagaggttgggctgggggcaggaatcgtgggcagtcatagggaagaccctgtcttaggactctgtgccagtgtggcaagtggcatctgctacaaccacactggccacttcttctaccctcctcacctcccactaagagcagagctgcttttccatccatcctttggggaggggaacagatcagcttttaatacagaacacagtgattcagtgtttctgctttcaaaagcaaaggggcaaaggctagaagaaagaaaacatgttcatggtggatttggctggaatctcaacaatcaattccgtgcttgctgctgctcattttattaccgttgcacgggttagttgcactaatctgaaattctgtgctgcgtgtttactggctcctctgtctgatcctgcttatgcttccactaatccttcctatagattgcctgcttcctcccgtgccccttctctcctttccaggcactctgatgctagctgcaagcggcatgttgcagatgcgtaatctggacaaagctgccccagatgggcagatctttgcttctcctcccctttcttgcccctctaagtcaggtaatacagtcaccccttaggggatcaatttggccagagttggttggaaagaattgaattatgtttctgagtatgagcctaggggagcctcggcctctggtgcaccctgctatgcagttcagacaaaggaagctgagacatattatccttccagaagccttgtgttctgctcagtccacaaccaagcaggagcccccattcctcttcccacatgctgcctgtccatttggctgtgaacccttttagagtttgcatttcatttagtgaaatgctgagctcccgctcctgcttgtagcccatccccaggctgtgtgggtcatgactcagcttcacctggtcttagaagttgaattgtgttccccaaaaggatatgttgaagtaataaccccagtacctgtgagtggaaccttatttaaaaacagtatctttgcaaatgtaattagtttagataaagtcagaagggtggacactaatccaatatgcccggtgtccttacaagaagagaaaaacatcatgtaaagacagactcatagggagaaagtcattgacaacaggggcagtgattggagtgatgcatctataagccaaggaatgccaagcattgccaaccactagcagaagctaggaagaagcaaagaagagttctgccacagtctcagaaggaccatggccatgctgtcaccttgatttgggactgctggattccagaattgtgagggaataaatttctgtccttaaacctcttgggttgtggttatttgtaataacagccctggaaaatgaatgtacttagaaatgcagtgatcctgagcactggccagtgggcagtggttgagctttaagggctgtgcctttaaagtgggcagacctcaagaaaaccttggccaagagctgccatccagagaatccctttggctcaccccatctccccagtgaggtccccttgttgactgtattctacatttggcccagacaggtctccactctgtggctctaaaccttcctttcttggtttggtttctgcttctccctttgaatagtctcagcatctgcttgctggtcatgccctggcctgggctttgcttcacaagccaggctgtggtaacctgttctcagtgtcccggaattacatgacctgcagactgtccctgattggcttttgtacttggctctatactggctgctcctgagaagcctctccttggcccattgctgccctgggactgctctgagcttcacaggaagaattacagtcagttcagtgtgaccacagctctctcatactggctgcctgaagaactctaaagggactatcactttgctgcagggcatcctaaagagtttatgttcttcttcttacatctgttcttcagactaaacccttaatccccagtgcaggccgtgggtgctcctgcctgcagcagctaagcggctttgagcctcctgagctccaggctcaaagcacagattctataagcaaggagccagtactgtcagcactgagatgactcagcctcttcatccgcatcagcaggacagtctggaccacagggagtcaaggtggggagggaaaagagaaggccactgagtggtcacaggaatgccctgatgtgtcccacaccatggatgacgtggaaatcaagtttgtagtctagttttgtttaagcagagctgggcatgccctttcctgtgcacacttctgtgttggtgcccatcactcaactctgatttttagtttgcactttcctctccccctaagtagtgagttccaagacagtagtgttgtctaattaccttccatgctcagcaccttgctatagccactgtcatcattataatcctagcaccactcaggttaggcaatgtccaggactattcctatgaagccaagggttgaactgatgctaatgagaccaaggtaatggatatagtccatgtggaggtcactgggctttgtccagttattttcatggccatgggctacattttatttctgaataaagtctaagccacacttgtgggcaagtttgaccccaccatggatgcagactgactgccataacacttctaaacccgagccgtaagttgactcctgatctctgctttagctttgacccctacctcagccacatcctggtcattaaccttgactgcggtctgaaacctaacccagtctacaaagtatgccctatacttggtttcttagacaaccttatacctgactctagtcatagcttaaggtcttagtcttaccacagactgaatcctctctctaccccagctgggtcttggcagccctcataggttaggcctccttggcacaacagaaagtagttgaggtcattgggaggtataaatggatttccagctcaccaacggtgaaacctttaaaaggatatgccatagaaggggtgtgtcaataatgactgtgtctggcatcagttgggcatgactgctcataaataagtctgttttcctctatttccatggataaaaaaaagacactttcttaatagaataaaggagttttcttacatccagaagacgttctctatcagagtctcatttagccgtctttcctggtgtgtgtaacatgactgaactagaatttgacctacacagagcatttacagtgtaaaacaaggtctatctggaagcatagattcaggagaccaagcaaaatcagcacttgaggaacaatttatttgagtggcctgagtgctttcaaacaatcaattaaagctattcctgtctcacagggtgctaacctccattcgaggccgaaaacgagggcaacttctgtcagcaatatttagcagttttagttgtataggctgtgatgaagtcaattctaacttcttaggactgactgggtagtattgaggagtctggggtattagaaatgtgtatcttctttgcatttaacagtacttattaagtggttttccacagcaagggtagagctatctttgaaaaccctgcatctctgtggtattttccagctacttaacattgactctgagttaaatcgtgactaaaagcaattactgtcatatgatgaattgaggcaatttatttattacttgagaaacatcctaggtgatgtcacttagaagaatgatgaaataatccttctcaagtgctctattatcaaccagatctggtgaaggaggcattgctttgaggcatggggaggtagtcagcaatttaaaaaaattagtcacagcaagatcaaagaaagaatattggagacaaagcagaaaaaaatcacctaaatttgaacaagacttgtctccctatggaattatatgggatggtttgtttgctaaatatcaataaaggtattatatagaaagcccagcgattataataaaactaactgcaacatatgaaaggcttggaggtggtggttgatatacaagaaaagtgaaaaggatgagggaacttaagttaaaaaggtcaagtttaaatatcatttgagcaaagtctgtataatttggctcatgtaacaaggttcacatgacatgttcatcaatcccttagatattagaataggatacgtgggtgcgagggcatgagaggagataatcttcaagaaagatgcatgaaatagaactgcatgatagagtgggtggcaaacccggcagagacaggcatcaatacaaagatattttaatctggctggtcaatggaagattctagatctaaatacgtgtctgcttctttcttccagatatttgagaaaagacaaacacatttctctgctgaacggtctctccccctatttattagagaggtgacagagtagtacgataggttaaagagaataatctctgtgctagactgccagggcctatgtcccagctctcctgcttgctaccattacttagtctctcagaggctgttcccacatctcagaaataggtataatgatggaacctgcttcataggtgtattagttcattcccacattgctataaatacccaggactgggtaatttataaagaaaagaggcttcattggctcatggttctgtaggctgtagaggacgcatagcagcttctgcttctggggaggcctcaggaagcttccaatcatgacagaaggcaaaggggcagcaggcatcttacatggcaggatcaggatcaagagagagtagtgggcgggggggggggtggggggaggtgctacacacttttaaatgaccagatctcacgagaactcactcactgtcatgaggacagtaccaaaggggatggtgctaaaccgttcatgagggatccaaccacctcctaccaggccccacctccaacactggaggttacattttgacatgaggtttgggtgcagacacagatccaaaccatagtgatagggcagtgaagattaaaagagagaatatatgtgaagggtttaaaacggcagcctggattgtagtaaaagccctagatgtgttacctctttattgttcattgttagcactttgcatgtggtcagatatcttgacccttctgtttccatcttctggaagaactcagtttcacacccggctgtcctgaaagtcagccacagtttctccatgttggccttgacttggctaaaatcaagctgcagttctggacattctccctgacttacaagcccacacacccctcgaaagtggcaaagagaggtgaggctagcatcacttgtttataagaagcccatgcttgtccttggcccatttggtgtcacaaccatcctttactgttgccctatgctcctgggcatgtaggtgacccctgcatgggacccgcatgcctactggcttctggatttggctaatgggagactttaataagagatggtaaagctggaggaagggaggagccttctttctcttgggctcaggccccttctttggcggtgactccatggcttcaggtctccagatgggtctaccagagttccacttctgttgggtgatccttacttctgggctttgagaactccaccatctctttttgtttctccagtctgggctgggtagtggcttcctgatactaccaccctctgagtttccccagcattgtctcctaatccctgtgtactaattttctagtaaatttgctctgttttaaaagttaggagtggtttccttttccctggttgaatgctgtctgatgtgaggctgtgctggtttctggtgattatttcttccttttttaagtggtaagggtgggggtggggggaacctgatttaatcatctagtctatttttttttcctgtatcaacatcacactagcgtaaagtatctgaaatacattttttttttcatttttaaaaaaagtcagcaacagcatttgtttctccccaggcttctcgcacccctcctgtttgctacaatttcagtcctcaaagactgccaaagtagttcatgatcacaattacaaatattctcaatgccttgggatgcaatttgtaaagtctagaggcttgaatctaatgaagtatccagatgctctcctgccaacttcttttctgtcttggactttaattccatcttaaaaataatctgctattctgagaatttgtttccagcaaaatcaagaaggtttatggtgcttacctgacttgagaagagccagaaagttgcccagcatcttcatcttttccctattatctcctcttggcaaaacccccataatcagagatgcctgtaatgcttaaaaccttccctgacgtagaagtaccagcttagagtcagggtttcaaaggttttccctactgggtgccagatacgtacaaagccagagaaactcttcaacaaaagaagccattcagtagacaggggtaaactgccagcaaagtaagatttgcctctgataagccacactggggataatatgcccttggatagctgagaaacaactgtatgttttaaagagtgcagtttttaggaatagtgtccctgagagccgggttgctttctttatcgtcagcaatgatcaccagcatgggttatgcatccattgggatttacttggttttatcaattgcaattaaatgttctttatctgtgactcctatttttgctccatatctttacaaggaaaattctctgaagtaaagctctagaattgggcctgtcaccagtgagagcacttcagaatgaatcattaatcattaattgccagtcccttgttgccaaattatgttattgctgccattaagtcatccagatgcaagcctgatatgggccttgcctatatgaggaaagttaagtgaatcactctaggggctctgcctttatcctgaggatcggatgaacttaggtagcaggttacaaggaggcattgcctcagcctctatgacctacagttcatagacacaaaaaaccctagtgctaccctggatccagtgctaaggtcacatcatcactgtgccccatatgtgaacagttcctcaagagtttatcaagcatttttccctccattattacatttgattcttagaaaatcccagtgtgaacttggcattttctaattatttcataaatgagaatatcaaatcacattgcggttaacaggtttgatcaaggtcacacaacccattagtgatggcatctagacgcaagcttgcatatttccaatgtgaaacccaatgcttttgactagactcataaaaccatagcatctcgacatcaaaaggggcataagaagtcttgtcgtcccttctgctttgtggggagcacaggatgttccagccagctcttgtccttgttgatgacacattcccctgcctttgtgggtaacatggggagggtcagggtgagggggtgggaatggactgcatgggagtctcatggctctaaagataatagggataatttctctcaccaagagtatgagtattactggaattaaggggaaccaagttgaggtaaaagatgacgtcagagaaaaaggtcagcatcctgtagacatgaggtcctcagggcttagttgtgcatccaggaagccaaggagatgagaacagagacagagtaagcaggtaaaatgaagggctgactctgatgcaggactttggaaccataatgacctcatcctctctctaacatgatgccgcattgaaagggtctgggctttagccttagctgattagctcttccacattcaaacgtttcctgtgttgattcctaatctaccccctgtcacttctacccagtgatacagctctgagctttgaaattaaagggaccaaatctactccaccttccacaatggccctttatctatctaaaggcaaaaaataggtctcatctgaatcttcccttccctaagatgaaaaatcctgattcagagtgatgtaccttcaaagtcaataatctctggaacattgtgcatctcaatcaatgtgtacctcaatcatgtagagaccttgttacaatgcagctgctgagttagtaggtctggggtagggctcaagatactgcattttttatagactcccaagtttcgccaatattctggtcgatggaccactttttgagtagcaaggctcatggcctgtcttcactctggaggtccctgttgagaggttgggttcacagctggacaggactcaccagagcattctgaccagtgcagagtagagcagggcagcactgcccttgttaggtctcagtaatccttggggaaaatcagctgggagggttgctgggtagcatgggaggaggcagcagagagagaaaacatggcaactagaccctatgtatggagctaatattgagggagggaagtagagcttaataaaccaagggccatgccttgtgcaccaggtttccatatgtaagagtagacaggtagcacatataaaagccagattaagactctgggctggagctaggaggagactggatccttagccatcatggcatttggggaaagaatagacagcaggatgcagcagcagctgctttgagaactggttcagcctttgggagtgctcagagctcagaggacacagttggctgtgccgtcaggtcaggcttgtgaggcttgcagcatgatgttggagagggagtctcctgtcagtacaagctgagttcacaagattatttttggttatcacatcacacaggagactcaagtagagcctcaaagcttccccaattggagaaatttatcatctggtgcctgcctagatgccaattctgatttgcttggcctattctcagattgggtcctctggagggtaaagatgaggaagatgcacccaaatccctcctccttctcccagttcccaaatccccaggccctgcttaataaaacaaagtcacccagagtcggagacagccttttagggactaaggctgatactaagcctgactctcatggaaaggatatgcttggggtaaaagtaacgcaggtgttatcccactgaagggcttccagtgggatagccctctgaaaagtccctttcgattttggggccactgagtcagacagatagccttctatatggacctactgctggcatctgtggaaagcgcaccacattgccaatggccccatcagtagccaaccctgatgtgcttttttatgactcccatcacaggtcacattctgctccactgagcatttaagatgtaatccctgtggccacacctgactctgccacaaaagcgggaccctcccatcctctgtccatccctcagatatgggagtcacacgtggatgctgtcttgcctttagtccatttcctctatccctgtatcacctttgaaccctgtcaacacacttccactatgaacagaggcacaaatatccagagtctagggcaagttcccctaaagagtgccaaaggcaaagctggattttccctgtcccagggaatgttcacgttcctgtatctgatgtctagttagaccaaccaagcatggatttttctaaaaacctcctgtgtaaagtctgtgatttcagctctgctgcctgttggctgaactcattgaattcgtctaaacctctaggctctggactttcagacagcctctccgaatcccctgaatgttcttctgtggccctcaagtatgttcttttgtaggtttatggtcgttgctgaagctgcttctatttaggaatgtcttggaattcttttgggaaaatttttctaatactcatccaagatcttcactttcctttgtgtgtggacttgattctaccctgggaacagcctttggcatagttgatcatgccctcctttttgaaacattctcttctcttggctctaggatactacactctcccgggtttacttcctacctgtctggtcactcctgttccccattcaggcttatctccctctactcactaaatactgcagaccctcaagtctctattctaggtctgtttctccttccactctttattctttcccagggtgatttcaccaacaggcccccacgcttcaaataccatctgtgtacatatgactcacacatttttgcctccaactctgacctttaatttagagctccagatcgcatttttgactacatactttgctggagtatatctcaagctccagttgccctagatatattttccccctaaagctattctttttccattgtgtctggaacccgtaaacattaccaccatccaccctatcgtgcaaagatttgtggtcatccttgacagttctttctcctttattccccatatccaatccatcaacagattttatctataactatttcaagtaattgtctcttttatcacatctgcctatcttcactgtcatcacctgagcctaagcaactatcaactcccatctgaatgcccgcagtagtctcaaaactcatttcaccaatccactttggttccacactaaagctggaatgatctattggaaatacaaatctgaccatatcattgctccttgaataacacttaaatggtgccctgtcttcctttggttaaagaacaacagccctcattgtggccagtaatatcctgtgtggactcattcatgatgccctcttcagcttctttttcatctttccctccttgctttcttgccctggttatactacatttcttttcttttttttgttttttaagtacaacagggtgcttgccccattaggcaaggctatttctcctgctgctcccatatgctgctttcatggtccctttgcctggttacagcctgtcttcctttggaactcacccctattaggggtgaattgctccaagaagcaatgcattttttttaattatgcaagtatctatttacaagtgccatgtgcttctctgttcaaaccttaacagggttcaagtttgctattactgattcttgatttattaattatattcccctacccccaaccaccactaattgtagactctttgagagcaggaactgttcctgttttgctcaccactgtatcaccaaatgcctggcacatagagggtatttatgatcacttactgaaggaatgaagtatgagtctcattagaccaagctaatagcattgttcctagagtaataggatcctctctaggggctctttgccattgcactcctagtctctagaacaggacctggtagcaggcacactaagtaaaattgggctgtgccagtgagtgaatgccccagagacaacccttcctccaaatctaaataaaaagactctatcaatattgaggaaatttggatctgagattctccccttcctttatgcttgctacattgtggattagccacatctcagaaatcatgtctccagcctgggaaatgggggctgcatgggagctcctcagaaccagccctcgtccccccatccctaaatgtcagaccagccctgctgaagagatggtggccaactctttcaggaattctctgggctgtagatgagaagagtctactcagtcagccctggaatttgatgagttggttttgccattagcttgtgaaaggaatgaataaaattcctcatccagaagtccttctaggaacagaatctctgactctacagacagcatagtttagcacacagcacatggccactcaatggcaaaataatgaatgattgaatggataaataaagtccacaactgtggttcactcaccctcatattatgttataatttatctgttaagcagcaatgatgaggagggaggcctgtgctagacactggcattagagagatgaatagggtgacttaccattctcactagagagacttggccaagtaaacccaacatgtctaagttacaacagcttggggaaagtgctctgagagaggaaacacttaatgctcttaagcaaaaaaaaagggggtgcatcaatgtgctggagggcttaaacatcagtgcattttgggaatcaggaccatagcttttgggtagtagcattccttcaactcaagactctgctgagttctatgaataaatgactttaaaaaggagaaaactcaatttgcttccatgagaacaaatgtgtgtgggcagagacgtcatccttttagctaaacactaaacaaccacaaacatttagggagccctattaccagtcagaatctgtgctaacatgggaaaactaagataaacgaggcgtaatcttgcccctgaggagtttgcagaccactggaggagacagatgtgaaaacaaataactaataatattggtgcattgtagtaaaagatattgtgaggcatgtgcaaagtgttataaagtgttaatagaatttagagaagagggagaaactctcccaggggcacaggctcagagaaagcgtattggctgatgaagagtgagctgatgtagatgtggaagaaaagaaggaatgagttaggaagaggatggtttggactttaagctgcttcccacttaaaggctggcgccaataggaatataaatagaagcaggaggaaattcacttcgggtgctgataacccctggactactctctagaatgtctgaaataagatgttgcctctgatccctagtacgtagcatgaagatactggttcttggcattctttgcctgcttactttgttatggcataagcagaatggttgttttagggagaagggattgaggaactagatgacttgaagggattcagggtttctgaccactgaggtctaaaattggaatcaggaaacctgtggaattctggccctgacctttatcagccatgtgacttttagcaacttcccttggttttctcatctataaaatgggaaaatcagtatctcgtctacctttgggaatgtttgtgaggactgaccaggccagatccatgaagttacccaggatagggctaaggatgtatagtaagtggccagtgacctgcctcctctactgaggattgtgtcagcaagttaacacctggtagagcatgttgcattagtattaaatgctaaaaatggaattgatcagatttaagtgtttttttgaacccaaggtgtactcaagttcccttgaatatacaaactttttgccctaccatttgttccctataaagaacaaaacaaaaacctctttttatctttaaaaatctagttatttaaattgtgttgccccaaaataaagctgttatttccaccatttacctgaaagaataatgtagggttaggtataattcccagtgttccatggtttgatcctagagacaaagcaatatgagagaaaaaaaaatcttaacttgatttgccttaaggaaaagaatgcttcaacacagttgcccaagtgagaacctaaggcaactcacttaatttctctgcatgtcagtttcttcatctcaaaagaatctaatgataatcccaacctcacaaggaattggtcctcagaagttattaaatgggacaatgtatgtgatgcccttagcacagtgcctggcacatagttagcactcaactaaaggaagctgttgtcattatgatgattgtctagtcgcatgtttgggtgctttcaacattgctatccttccctttcccttcctaggtgcctccacccagaattctaacactgtggagccagagaagcaggtggacaacaccgtgaagatggctggcgtgatcgctggcctcctcatgttcatcatcattctcctgggcgtgatgctcaccatcaaaaggaggtgagtctctgctgctgcctgcaagactctgctgacccgaggtgacctcaacactgctgtgtggccaggtttttgctctgttgatcattgtccagcagggatcttctgttataaccattgaggtccggaaatacatgggccggctgtggttcattgtgttgctgtttgaagggtgcatgctgcctgtttggcaggtggtcctgaggtggccattttcttatgggccagtgatccctatgactgggccaccgcgatgtgccatgggattccacgtatcatgaattgagtcttataggagttaactgctgtgttgttatcaatcatgtcatcaagatagctcgggagccccaggaacatggatcagtccagaaacgcagttgcaggaaagtaatgttttaccattctcacctccgtttgcccctgatttccactggtcaaataatagcatcccaggctgccctctccatgagagatagagtctacagtggtgtgagagttcccaattacaagtcctattacaggctctgtactatgtcctgtcccacagaaccttcccagctgggttgctgttgtttgtcacctctcaaaagcatgtctccctggactcctttggccagctactagtttgctcatactgtgtgttttctccagttgcatttctcacgaaagcatgcacacagattcctcccttatttccaagatgtactacaccagcatcctctgtttaagaggcattcacaaggcttgaggataacacaaggaaattacagagggaagaaaatacaaagggtgaatatcagctatccctgtccacagggtgcactggttattcctctaaacagagagtcttactcgcccctctccttagcccctgcctgccaccatgttaacacatctacttcccacctccacgtcttctcagtttcaatgccagggccccaaccttagtctctaccttcccactcctcagtctatcatagcaaacaaaacatttatccacattataatactaggtggtgtattgtgccctgctcccaggcaaaagagccttctacattattaaccaaaccaacacctcagcctgaagctctgggtttgcttatgcacagagttcagggcaaccccaagaacaagggctgggaacttgcttccatctataggatgaaaaatgctcatcaaatgtgtttcctaccagaacaaaggaacagaatacccctaacaactaattccagctcctaccttaggaaccacatgaatataaaatgaagaattttttaaaagcaatatccccatttccagcaatcagtgatttagaaatactagggtccccactacacatgcagtcaaccctctcttggctatgcaagccccaggatgtccctctctctctttctcctggttctgctttggatcaaccatactagcctctggccagggcattaaactgtgaggacatttcttcttgacatttttctgtctaataggatcatgtcttgcctcaagctcccagcacaatggcttaagagctaaggttctcctccatctactgattttctggttggagaaactaggggtaacagaaggtattatgttaatattgggggtgaatagccctcaaagggttaaggtcaacactacattgtcatatcaccatcatcactgataacacatggccacattatatgtcccagtgactagtctgctgctattacatagggtagtatatgacttttgatttctctgggagcagtaagcacattgtacatgtaagatcactgaaatgtttcttagagttacagatgtattagaggcagaggtgaaatgtttcttagagttacagatatattagaggcagaggtgagtttgggattgtccacccaaattaatggaactgaatacctctttgatagacctgaaattttattattctttgccactgatttgtaaatcagatatgctcttccaattttgctctttctaaagcctggcttaacccacgtcaccatcatctgtgagattgtgaagaaatttcacttccttctcacagctatttctgaaatgtgtgagtgtgactttttgggagggaggaaaaggctttatgtttccagggtaggagcaactataaaataagtcctttgtggtagttttaacctcctctgagtatcttcatcaactctcatgtctatcaaaactgtccatcagacccaatcaacaggcatcacatgatcaccatttctccccaggaggcaaaacctgggcattgcatgttgtggggtgctaatcagtgtttacatatatggcatcttttgaagaaaataagacattttgttggcctagttgattggaacagtttacagatgggaggggagggtaggaggagaagaggagaaaatggggaggaagagagaaattgaacataggcctgcactctttccactaacctacaatgtcttcctgtgtctagagatgccccaaaggaaagcgaaattctgtgtacctcttctgtccccagctaccccccagctgcatatatatatcaatatatactacactgatcaattgagtctgctaccaacttactgttggccagaatactgtctacatctacctcaaaggaagatgtattcaagtcaaagaaacttccaagtagcaggctcatcaccatagctcaggatactagtgttaacatctcctcagtgtcctatcatcacctacagtgcttggactcagaagttcacagaggccaacactgctacaacccctccactggcttaagcttgcctgggtcttctccctgccttccctggtcatggacatggttactttccggggttttttttctgctcctaatagattcagctgactcaaagcccccctaaagctataaccacagatgtttccagaaacataagatgtccccagcttctccctctgaaggtttgtgatcactgactttagagcttccttgccactgtccaaagagagtctttctcttcctgttaggggtttccttttatgacacagaactagaagacagacagagaatgggcttgagatccatggatgaagggaagggtttaatgaaaaaagctaaattaatttatatttagacacctgaatacaaaatagaggagggaaaagagagaatatcaacaaaacttgagaggtgttttgttgttgttgcctggttttgttttgtaacggggggagggagatcttgagaaacgaaaaggagaaagggatatgagatgttggtgggtgatttaaatgggattctcttatagtttgaaagagaagcaagttaaagtttagaattctttttgcattacctttggctgtttgaactgggctgtattgaatgtggaaccatatggaattaggattgcatggacataaacaggatgatatgagcattataagaagggatcctggagcccctcactgacagagttaactaccagtgtggttttagccacaccaactacacaatatccatccttctgctgtcactagatagtggctccatctttttcctctggatctgtcgatcacatctagagttctgaatgttctgtaatgggtaccccatgtcattatgtagtaaaatgtacctccttttcatgagtaccatgttaagtcctgacataagagaaagaccttcatcactgactcagcactgcagtcctgatcatcttcgtcccttgcctcctccccttagaactgttagacatcctccccactcctccaaaaccagcaatcaagaggttgcatgaccaactctatgttttcttaacttaataccatggggcactgtgtgcctttaatgcaaattaagatgaaaagatcaagtattattgccttaaccagcatgtctcaatagttgaaagtgttcattagccactcacatatgagaaggtctacaattcaatgtttgtttgtggagcgtgaaattatatgtatgcgcacacaagtttcatatagctcgattttatcccttgggacacacttcctggagtctgaacatggtcccttaaagctcaaagcatggccatgcacttatgcatagggaaacaccaaagccaagttatgcaggacttttcacaagatccgcacccctggacttgcctggatcctacactaacccgtccatcacattttaattttcaaatgagaactaggaaattttagggaggtatattcaaagttggtaccatccatggttctagccagaccctgtctcctcccctgctcccctgcccagctcgtcctagtccagccttaaccttttgccaaactttccttgtctgtccaaatggaaacttctgttccaagagtgtatttggagtgtcttgagtataaatatgaatgtctattctgatattttatatgcatctctggttatacatcaattctctgtgacttgtacctgccctccagtagctctcagtctaatgggacagagaatcagaaaaactggccccaaatttttagtcctgtttatttgctgtcaaccttgcagaagcaacttaacaaatcttagcctttgctttcccttctatgaaaggtagccagttttatggggctattctaaagatcaaatgagctaattattgaaataggctttgttccctgaacctgcttaaggaattacaatgcacaatatctacagaaacattcatctccacatgaccatcaactgtaccaggccagctccaaacccgttactaatatgctaatggcagggttgcaatcaatgctcacacactgacataatttgcatcatttttcatttaaactgcagctatactctgattttaatattcctaataatcatagtaggttaggtctgttgcttgtttgaaaagaagaaactgaagttcgaaaagatcacgtgagttggtgaacgttttgggcagagttgatgtggaaacccagtctcagtgtctctagagctcatgctgctaccttctactctgtcagtccatggagactgacaggaaataagcaaatcctggactaagaaacatgtgactcagattcggtaccactttcctctctggggcttgtttttcccaatttcgctattttcttcttttgagcatgctgtttccctgaatgaaatgtcctgagatttctcttaacctacaaagttcctatcacactctgactctcagcctcttgttcttcctagtaggactcccaaatgttaccatctcagcaaagcctttccaccagcctcctgccccaggaagatccagtgatgttcctctgcagccactgtgccatacatgctagtcttcatttgtgtatttatcacactacccggtggttgtagttttgctggcctgaagatcagtcttctcttgttagagctccattatccatatcatctgcccctggacatctaccttgaaaatccctcaggtatttcgtagtcaaagtcaaaatcattacctactccccaacctgtttcccatctcattcacaggcactacctcctatcccatcaacaaacagatgggattccaacacccaggattctctacattctcttggtctcattctctctctctctgtctctctgtctctgtctctctgtctctctctctttctccccctccctccctccctccctcccttcctttctgcctctgcctctgcctcctcttcctccattgtcttttccctgggtcagacctctatagccctattgcatgagtttcctcactgaccttcctaactgtgccccacccctctaacctatcctccatactgtagtcagcattgtgttaaaaaataaagctcgtactctcaaacctgtcatctgaaacccttcaatggcttcttctccatagccatggttcatgaggtggaagtgagggaagaagtacatgtctaagtcacctggggaactttgtcaagtgatactgtctccctgcccatatggaaacaagtttcttagttcttcttagctttttagtttttctatttttttcttagtttttctgacaagtctcctaaagtctcacctctgctccataagttttgcttacgaactttcttcttcttcaatgcctgtgtttctcagctccatgtgaccagctattacccatgtttaaggactaattcagtaggcactttctcctataaacccttcctgacctttgatctggacagaatctcttcaccatctagatcccctctgtgaggacccatgttattttctgccttatacttttcctttgtatttgcatcccatttcctcactagaccatcagctgtctattctgattcatcttcatctccagtgtgccttgcaaatactgagaatttcctaaaaacatgttgaatgggagagcccagtggaattagaacagatcaactctctatggattatacaagagagcttcactcagagaacagacctaaatgtcaacattaagcattaatggttcgtgcaccaagtcctgtggtaggagggtggcaaggcaaggctggaggcagtatgtggaagacatgccatggtctgagccttcagagagcacattgccacaaaattttgttttgttttgttttgtttctgggtagacaatcagaaaagctaactcaggccaagctaaaagagcagtgcactttattaagggtactacagatcagaaaactgaaatggaaatagagtttaaggaaattacctggaatcacatacctaataaatggcagagttgggtctcaaacttggacaatctgataatggagtccacactctgaaacatcatctaatctggattaaatataaaacaggacctgctgagatgccaaattctgtggcataattttgagtgatttatcgaggtgggaaaaaagcccaaacgcccaaacaaaatgtgtcatcttctgttcatcctgttctaaactgctccttcctctacacctgaaaattgaatcctgctccttctgcttgcactcacgtggacagccacttaagctgagaacttggaagtcttcttcaatacattcacatttaatcaccttttgattttgtgtcttaaacaccttgcacactgctgacctttcttccccatcccatggccactgcaaaggaagcccctggtatttcttgtgttggccagtcagtgatggtgtaaccacattcactctgcctttgactttctcctcaccctcctgctaaaaataattcacctacaagaaatatttggccacatgacttcctgggttttccctgtgacctatgggactgagaccaagctgcttaaactctttgggaactagcccttccaacatcttgccattcccactttgttaacccacctgcccaaaccacaaacacagttccatctacctaaaaattcccttcccctctcctccatctgacttctcttttactttaccactcaggcatcccagattttgggccatcttgcctgctttccctcctcactcctatccccaggtatggactgacagctccatgtgttgccttatcatacaatttatcatgacagaagataatacaatgtaatagctattaatacaggctctttaaatcagactccctggattcaaatccctgccatgccacttaacaactatataaatgtgagaaagttccttaacctctctgagcctcactttactcatctgtaaacagggataataatgcctcataaggttattgtgaagattaaataaaatagttcatgcaatatacttaaaacagtacctgacacatgattgatctcccagtatttaagtgacagctattatcatctgctttataatttgctagtctggctctctcatcagacatatggactagattaggatctcatatgtctttctatctgtacttgacagagataaggatatagtaggcctttgagaagtttctgctgaattaatgatggaaagatggataaatggatgatgggtgggtggatggatggatggaatggatggatgcatgcatgcatgcatgcatgaatgcatggataggttcatggatggatggatggatagatggctgaacaggtgggtttgtgatctagatggatgggtaggtggttaaatgggtggttagatagacaactttgtcctgtttaaattgtatggaacaaaagaaaactgtgcctgaagtcaatcttgtgagctagctgaaaaaaggttctgcagtatgtgatttattaagtttggggttattgttttgttttgttttgttttttctaagcacagctgtcttcctgctcaggatttttggtttcaggcaatctgttacttgcaatatcactgtatccttgtaaatttagaccttcagtaaatcttcttcaaggcttagagaaaaacacacatgtaaactgttttggtcacagaataaagacctgtgatacttgacctagaagactttgcagtttaattgggaaaagagattcaattaatagaagtttgtcagttaccattatcctggagttgccttgctgctgggtcagagatagcacgagaaggcttttggtgacacccaggataactcagaaaagcaacttggaaaaggtggtctgtggtttgaaggtgaagaaggaagcatgttttcttggctcaggctgaggtgaatcctgaaggttgacagcagaaaaactagaaggtccagaatgctcagtgtagctgaggaggaggtggctgctgacagtgagagcatccagctcaggatggaggccttgcaactggtccaaagatacacaaagcctttgacctagtgaggcatggacttataatcttagattcctcagctaaccgtgagagtaattatatctgctcctcagggttgtggggaggattgaaagagataacgttttgacatcccagtgcctgactccccagatttctcaagatatatccattttcttctgtccttgaaagcagcacaggcttgaggtcaagaacatgagctatgggctgggcacggtggttcatgcctgtaatcccagcactttgggaggctgaggcagatggatcacgaggtcaggagatcgagaccatcctggctaacacagtgaaaccccgtctctactaaaaatacaaaaaattagccaggcgtggtggtgggcacctgtagtcccagctactcaggaggctgaggcaggagaatggcgtggacccgggaggtggagcttgcagtgagccgagatcacgcgccactgcactccagcctgggcgacagagtgagactctgtctcaaaaaaaaaaaaaaaaaaaaaaaaagaaagaaaatgagctacaagctttatagccatgttgctatcaaatccagttactagctgtgtgatctgaagttacttcttgtttgcctcagtgtctccatcagaatagtgggaatggcactaattcctatcttttagagcaactgtgaggaatacatgagttaatgtgtgctaaagctgagaacaatacctggcacacagtaagtgctgaataagtatttgttcatattttattattcctaaagaggtgaacactttgttcctggtgaccagaataagaagcagtaaaccttatctctgtggatgaggtgcagacataaaccaccctttactgagccctaatacattccagatgtttagattaatataatctaatatcaatttagattaatggaatttacatagaatactttatatattacatatcatatctaatgtgagtataatttagattaatataatgctaatgcctatggtgattcttgggaatacataattattgtccccaagcttgagatagagaaactgggactcagggctgtttagtgacttgttcaaggtcatgcagttagttaagtgatggtgctgagatgctaaggcttattgtatttccactcctgaaagctgtttgagctgtcggtcatctatgccatccaccttggtgcatggatcaggaaatagaggtccaaagggaagaagaagaacttacttgcccaagatgtcacaatgagcaattgaaagatctgagattataatgctggcctcttgattctcagctcagtgttcttgacaatacagagaacacaggtgtcctataagtcttcatcaaatggaccctgagttttgtgtcccaggggaatcaccttccaggcactggacctgccagcagtgaggtaaagaaattatctccttacagtgctaacgtgtatggctggtgaaggggatttgatgactttctgtaggagcttccaattcccactcattgcagtccccagtccttcaccttctcatcatctagggtcactgttctttcagtccaggatattgaacagttttctatgtggccagatcttgctgcactgtggctcattttccctagctcagccccctaaggaggtatggggctttccttcttctgtggcttcttaacttttagactcactttccttctgggtgtgtagggttgggctttgctttaggagtgatgcagctctgggctcatgtcccgcctctatcatgcactggttatagagcctcgggcaaattttctaaactttttgattctcttttctcttaattataaaacgagggtaatggtgcctgactcacagagttgctgtgaagaggagatgagatgatgaaagaaagactagagatagccccatcttgggagttttggatatttcctacttgagatgggaaaatttggggctgtgaagacgtatcccccactctgcagttataacgactgtattttcctgtaccaagcaaatgggataatggttgcaagtaatcaaatagttcaagaaaaaaggaaaccattcttgtctactcagatggatatttggagacctgaattatctagccatttttctcaatctataaatgtatcatttattgtcagtatagctgaatctgatgtgaaataagaacactcctatttattttcttacaacataagaaaagttataacaaagggaatatcatgcttttatttgagttttgtgattgcttagaagccaggagccagtaggaacattggaaagagattgaagccagtgatttttgaagctttcttttggagaatggaattctcagccatatgatatcttaaatgaaacttcaaagtataaaatagataaaacttcaatatataaaataggtgctttggtggatggtggggggcagcagcctcacttgctcagtaccctccttcttcattacacagtggctgctatagaacccccagacttctgtgaacacagttggaaaattactgatctagtttaatggacctaagggacagatgcagaaatgaaggaacagagagtttattcaaggtagagtctgttcagactgaaggttggaactcctctctctcagtacagtgctcttccaagataaggttggactttgcgccggtcatctactgccatgtaacaaactacccccaaaatctaatggcttaaagagcaacagttatttatttttctcatgtgtcttcactttgggcagagcttgaagggaatgacttatttctgttccgcaatgtcaatggtctcagctgagataacttggttggctgaaagtaaaatggctgggggctggtgggacatttctttctttttatgtagtctcagaggctctcctgtgatctctccagcatggtagcctcagggaaactgggcttcttctatggagactgagggttctaagagagagttatggacagagctgagaggcttcttttttttccccagcttggaaagtcccagaacataattcctaccacattctattcacacagggtcagtcctgactctgtgggagggcagtccacaagggcctgaatactaggaagtgcagatcactggggagccatcttgggtactggctatatgatttccttgctttgggtatgaccttactaaatagactctgatgtgactttatctgaaatagaggagacagaagaagtttggtgttgcttagatcacaggacattatcatagggaagagtggtagactagtcccaggaagccacagagagctgatccaataccctcacctgcaccccgccgaccaaaaaaaaaaaaaaaaatcataattacaaggaatctagttttggttgaccataaggaagaactttgaaccaactacaacagccaacatgaaacatggcttactctatgtgagaccatgggtttccctattatagaagaggtctctcttgtttcttctaccactggaaatatctgattctcagtgaagatgattagtagaggaacttgcatctccttgagcttagggatgctgaaataatatgtgcatttctaagaatcaagatttcattaaaaatctaattcttgtttgtttgtcttttctttttcccccattttggacatttccttcatctgactgcccatcaatatatagaagaaatgcttattcctactcctattacttgtaagtatcgagctggtgttaactttgcttcgtgccctgtaagggaacctgtagcatgcatttcctgcaccaaccaagtgtctgttagtttctcattttcacttctgtctaagttgtctgtagccttaaagtttttattttgcataaatgtgttacatttgaaagtgcactgtcattgttcaagttcgttatgtttccaccatcttggatttttttcctcttatttttagagatgtgaagggctgtttctcctttgtgagtgtaattttctagttaggaatccctgaattccatcaagcaggggaccaaatcctgctgtaggacttgcacacatgagacagaatcacagtcttagcaacttctaaatccatgtgtttttacttggagaatgggtagccctgggggctcaaagtttagaaaggtattcattggctgtttatgctatttcagaaagtctgcagggattcattactttatctagaaccggcctcacaggtgaaagaaacatccagtgtctttgctttgggttgggattatgtgtttggtgtttagcattatttatctcatattatcagtgcattttgttgggagttatagatgggtgcttgcttatccatttttttgcacttgctaaaaaaaagtgattatttttcttattaataaaacagagggccaggtgcggtggctcacgcctataatcccagcactttggaggccgagagggcagatcacctgaggtcaggagttcaagaccagcctggccaacatggtgaaaccccatctctactaaaaatacaaaaatgagctgggcgtgatggcaggcgtctgtagtccaagctacttaggaggctgaggcaggagaattgcttgaacccagggcggaggttgtagtgagccaaaatcgtaccattgcgctccagcctgggcaacaagagcaaaactccatctcaaaataataataataataataataataaataacaacaacaacagagatgctcaaaacatgatagtaaaggagaacaactctgtacagtagatccttggtgataaaaagttagaaagcccctgaactagtccacattcctaatatgcactttctatttttggaaattgagaggttgtagggaccttagaaagagattgaaggatgtgaattcattgaacatccagctagcaaaagagtgggattaaaacagagaatgcctggcttccggtaaaatgtattgcttagcgctccatgtcttccctcacctctggcaaactcagctttatgagagaggctgtgcctaatagcattacctgctgaaggcttcatagataaagatggagccagcaaaaggcctccccatcccctctgctcagtgtggggtccacaggtctttaggacgggtactaccaccctcatgttatatgggaacaaatgggcccccatcaccaatactggaagtaccagatcacttattcattcatcccacaaacatgctttgaacatgcacattatgtttcatatggtgtggatgaagaaatggctagaacccagaggttcagcctcacagtatgcaagcctatctgagagactagcataacgtcacctattagaaacgttagctgagagatgcctctacatactgtagtacaggaacacttagttgagtgatgaattttttgtgtggcaggggataggtatcagtgtattcagagatggctttacccattactgaaaaaattaaaattctgattagaggaaactgcatctgcaaagacacggaggtacgaaacaatatggtgtgtcattgctatggtggaaagagaatgagcttcaggagtgacgcagctctgggctcatgtcccgcctctatcgtgcactggttatagagccttgggcaaattttctaaactttttgattctcttttctcttaattataaaatgagggtaatggtgcctgactcacagagttgctgtgaagaggagatgagatgattttgtaaagtgcctggcacaaagttgacactcatgaaatattagttttctttatttcccctttcagaaaccacagggttcatggcaggaatagtagtccctgggagcccctctcttcttccagggcctcttagggtatgcatgtttcacagcagatgtgggcatacagggacccatcaccacctctggcatctaacccccatccctctatcagccagtttgcctatcagggtctttgaatgcccactttatacagtgctgtgtgctgggtgctggggtggaatccaagataagcagtgtgaaaggacagaggatggatctgcacatacttgcagttgaaggtgcaatgataaacacaggcctttcaattggtgcagacatgaagttctgtgccacaggtcccagagcaggaagctcataccagcagtgggatgcagaagcatctggataggacacagggtttccataattatattcattttatattcaccaaccccaaggcccccatgacggtcatatattgtatgccactgcaaatagcctgccttctatacagaaaccttaggtggttacatttcctcttaagcaccatcttcccatcccaactaccaccaagcacttgtgatagatgaaccagttgctagacttaaagggatcgaacaggtaaggtatatttaatcatttatacaggaggggagaataggaaaccaccaccacatgccaagtagtctgtacatacattagcccactaagtcctccgaatagcctagtctggtaggtaccattatccctatttaatgggaaagaaattgctctgagaagctaagtcattcccccaaagctacccagaagtagatgggagggagaattgattatcctggaaatggagacgtcttggggtgagaaatggtcatgtgagtcatatgcatatgactctggatatattgcagtgagaatgctggtggagctcccaagcaaaagcatcccatgggaacttagaaatgcagaagtggagtctaggtaggacgtggatgtttggaaccttcctctgagaggttgcagatgagagtgccaggtggatgaaagcaggcctggagaaaggggacaagaacagagggctaagggctaggggctgaggcccaggaactgaccatgattaaagaatcagaagaggagaggaactggcaaagcagacagacaggtaggagaaaagcgtaaggcccaagagaaggcttttgcagcaggaggagttggttggccatagcagatgctgcagaggatggagggggtgggtttgggcacagcctggacatttggccatcagaagtaacttgtacaggttgtagggatgaaggttgaagaggtagccagcctgcctggggaccatgagtaggatcacctttcacctttttttttttttttttttttttgtaaaacagagaagaaacatgatactggctacctgaaagatcagaaagtcctgggcaaagatttagttatagtggaggagcctgggcagaaggaaggggctgaagatactggagttgggggctatggaagtgaaggactggaggcgaggtgtttggggacagggaacagtctgggagtgggggaggagggagaggccttggagatgataggattgagagagagccatggagatgaggaagaggaaacagaaaggaaatgatggccccccatgtgctagtatatgccccgagggggagccttgaagcctcactcttcagtgtgtggaccctggaccagtagcatcagcatcacctgggagcttgtcagagaggtagcatcaagggccccagcccagacccctgaatcagaatctgcattgtaacaaggtcgcaggtgattcatatgcatgttagagaatcactgacttaactggagtctcagttgtcttatctataaaataggaaaagtaataccctcctcataggtatcaggggccacctggtccttttaatgaataaacactgatttcattgaagtgtgctctctcttcaacacactttggctcaccagtctcttcaatgaaatcagtgtttattcattccaccaatatttgtggaatgtcctctgcatgctaggcattggacaaggttctgggtatataggagttagcacaagtaaaaattcctgcacacgtggagcttttttagtagaagaggtagaaagtaaacaacatatataacaaaaataaatagtatgtagtggtaagagctaagaagaagaaataaactagggaaagaggagataaagtatggatgggggaggagcagaggaattctatatttcccccaaaataaagaggccatcaagtgctctccatctttgaaagtatccctacatgagaacagtggtccacaaatattttccataaggagccagacagtaaataattttggctttacaaacccttgtgttctgtgttgcatctactcaactctgatgttgtagcatgaagtcatagctatgtgtttgaatgagtgtggctgtgttccagtagaacttaatttttaaaaaccaagcagtgagccagatttggcccacaggtcacagtttgccaattcttgccctagagttttgagcgtaggaagagtgtgacagtcaagattcatcctgtcttattgagctcctgccatgtactttatcccgtgcctgatgttgcaggcacaaaagtgaataaggcgcaccctataccagactacaaaagggcagaagttgaaaggcattaccagttggtccctactatatatacttacccaatgcttataacaagccctgcaaagtatatgttattttgttgattttatttagatgttaagactgaagtctgaagacttgtctattgctcacagccagaatgcagcagggttaagtttgaactcaggaccacatggcccacaagccctacccattcttcttactaagccctgttctttgggagatgggggcacttctgcctggaccacgtgcttggagcacagcagccaggttgaagaagagccaggtaccaaatgcaagtctgtctgcctgtagggcctcgtttctgtgcatggccatcagtgcccttctaggcataagaagtggtagctattccaggctggtaaggaggccgctggggcagtcctgtctctgctgtcctggggattggccacatgatgtggctggtcttccaagcagtgctgtgcacaggcaacatgttgagaggagtcagagctgagggcactgagctgctgcatcagaggtagccaaagggttagagcaagaggttatgaaaggggtgttaatgaccaggataaataacagcccaataaaaatggagctatggaacagagggatctggggacccagggacacaggatagttaaagataaggcccattattgtctctccagtatacacgcacacgcacacacaaatgtgaatcatgtgggttttggtgtcaggcctatttcacaattctaggtttgcctctcctgtgagattgtttccacctggaacactcatagaaacactctgagcctcagtttcttcatctggaaaatcatgataatagcggtgacttcccagtgttttggtgaagggcaacgagagagtgtatatgtagagtggctggcacacagtaggtattttataaatagcagctactattcctcacattctgagctgacaaaaatgcctctctgggatccctttttgcctttctgtagtaaagcagaccccaacaacttcagttgttcagtgtttgcctttttaaaggatattaagagttggcatgtgtccacaggttaatttacctcaaggtgtgtgataggcacagtaattgttttgaacagaggtattttactgtagtagttcttgagaaagcgcgaaggtgtttaccaattgttctggctgagagagagcacgtaactacttcacttagccttggacaaatgccttgtgcagatgtctccgaggcagaaaaccgtgacctgggctggtttctgtccacagatactccatgggactcctgggcttttctatagccttctgatctcctccatctcaatatattcaaatccgatatcattcttcaaagtccagatcaaacactgccttctacaagaagtctctcatgattctctccacctgtgggaatggcgcctttctctgaactgcagttgctttatgttatgggcaggagcaaatttgtcttaaggatgttgcttgctcattagggtattctccatggaactcctaacacatgcagtgaaccccagtaagtgcctgtgtaatgagtgaaggaacaagatgaatttaaaagacatacggacatacagctaaagtcaacagggtggtactctgttcttgaaaagaaaaaaaaatgacatcattttttagataactctagaccttgtaacttccttgcttctgtgggtttaaggccatttttgcttctatttttgcatctgtgtgacctgaacaagccactcaactttttctgaatctcagttgcctggtatgtaaaacagagacaaaaaatacaaatcttacagaagaagtctcacaaagattcaatggacataatgtaaaatgcctagcacatagtagggcctcaccaaaataagagactgctcctttcttcaaaggcaaatgccttttcacatcatcagctgctgtgaagcagatatcattgcttcaatatatttaaacaggcattttaaaatgattccatcaagagatactcaaaagttatttaatgtaatttatcagccactttgaataaaaatgaagaaaaaataggaatagaagaaaaccatttaaagttgctaaatatcaattactagtaaatatcaaattatcaacagcaaacatgttaataggtgaaaatgtaagacattaccatgcagtcaagactaaagtggttactagcagtgtggctcttcagccaagaggagaaccttggtgggaagtctgattcctgagcctcaccccccagatctgctcagtctccttaaaagcatggcctggggatctgctttttaacaagtatctcagattcttatttttcctgctgactttgagaacaactctcatggcatcctcacatcactctgatttaattgtccctttcataatgtttatccctgcagtgaattcttcctggaattcttcctatcccccttgtgtgcccagaaaactccagtatctttataaagggagtgtcattgttctctactttggaggccccctccaatttccatggaccatatccatagcgctgggctcatatctttgtcgttgcatttatctttcattccttcacccattgacttactaattcatgatcccttcccaggttatcctgcccttggcatctttgcatgtcagtctccatgtagggagaactatgtattactcatcattcatttcccagtgactagatcagtgctcaggacaaatcaggcatcataagattgtgttgattagatgaatgaacaaagatacatgagtggttatatgtgtggagttgatacccttccaattttgttttgtctctcattgagttatattattctattctctagaagttagttaatatccatgttcacttattttggcctacggtgatgatagagctttcagatcacctattttgtagtcttatatgggttttaggtttagaaatgttgcattggtacttgcatgacacaattataaatgtgtaaaattaatgactgctattacaatgagatattaatagatataaatgcactgggctagaccatgtgtactgatagatttggatagggattgcaactgaacggatgctttattgtttactctattgaactggcgtctaaacgcatcagtcacgcatgccaaacagagcaaatctgtaagtcagaggctctgtcactttaatcaggaaaaatacaaattttacctccaaaggtggcaaaaggtgtttatatttcagttataaatttatacctaagtttaagttttattatgttggtgcaaaagtaattgtgttcattactattttaaaaaggtaaaatgtacctttaatggcaaaaaccgcaattacttttaaaccaacctaataataccaaccaggtattagtgatgtcttgaggcttagaaaagactgtctgtgactcttaatgcttctacctcataaacatacttgaactttataaacaaggttaatgagagtatggagattctctgctaacagaaaggagtaccctactgcagtgtggttagaaagaaaattcctgtggaggactctgtgatgtgctgctcagatccaccttcaagaatgagggggctgggcgtggtggctcatgcctgtaatcccagcactttgggaggcccaggcaggtggattacctgaggtcaggagtttgagaccagcctggttaacatggtgaaaccccgtttctactaaaaatacaaaaaattagccaggcatggtggcacgtgcctgtaatcccagctacttgggaggctgaggcaggagaatcgcttgaatacaggaggcggagattgcaatgaactgagatcataccattgcactccagcttgggcaacaagagtgaactccgtctcaaaaaaaaaaaaaaaaaaaaaaaacaatgagggactttccccattcgctacaattgatgctgacagatgcctatgaaagaatgatcacccaaggaaaagctttttagagtttttgtattatcagtgagcaacaaactaatgaccccaatcggtaggcaaagtgttcataggcaatgaagagtgcatttcaggggagggaaacccacttgtttgtgacactaacagccccccttcagaacttgccctttggagccgcctcactcaaagtcatctactcactggttgacacagggtgtaaaagcaaccccagcttcagggcctcccctggggttggctttagccactgctccaactgcatcaccattcaacctttcctctgcccactccctttctttttcccttccctttccttccctccttctttcctcttcccttcctcctcttccccttctctcctcttcccttttatctacaggtgaagcttccccaatacatctcctgcttgtcaatctctctcagagtctgattgattttcagagaacccagcttgggactctcccattggcttttctggagacaagtgggtttcccaccactgaaatgcactcttcattgcttatgaacactctgcataccaactgattggggttattactttgttgcccactgataatacataaactctaaaatgtttttccttgggcgatcattcattcataggcatttgctgttcacctgtgcttgtgctggacctgagagccacagagatcttcacacatagctcctgcttgggggagctgaagatgtatcacagagaagaccgtagcaatacccttttgctgatccagccagaggagagaaccagggtcagaagtgcccagccacagtgcccacttagcaatatgtctccaaggcaggattgggtttacttccgaaagcactaccttcagcaagcatcccccaaatgggaaggactcttacagctagagctgtagcaaagatgggatcctgagatgcacaaactggaaaatgcctttctaagtgtttcaaaatagtgcttttaatggaaggaaatgctttagttaagcccctcaatgttgatgatgatgctaatgattgcattttgtttgtttttagggatttatctcttccaaagtgctttcccacttattacctagttgtctagttaagcttggaggtatttcggaagtcattattagatagatgactgtgccaagcaggaaaaagccctgagcttcctggctccacagttttagataactcacttaattccatctcaacttcagtttctcatctgtaaaatgggagtcataccacttacattttacaatagctctgatgtttaaatgacatattatttcattcataagcatttgctgagcaattcccttgtgctaaggagagaaaattgttgagtctttagtaagaaataccctctcaaggagcttgcagcttaaaaggaacttgaacgtgttaataaaacgttacaaaataatgttacaagtgcatgaaaagaggagcagtgaagacataacaaaggcaaggaagtcactgattctattttgaggaaagataccatgggttaacgggcccagtaaagtttttggtataaagtagatgccagatgtttccttaaagaaatgacacatttggcctggtgcggtggctcacacctctaatcccagcactttggcaggccagggcaggctgatcacttgaggtcagaaattcaagaccagcctgaccaacatggcgagaccccatctctactaaaaatataaaaattagcctggtggggtggtgcacacctccagtcccagatactcaggaggccgaggcagaggaatcgcttgaagccgggaggcggggtttgtagtgagccaagatcgtgcagctgcgctccagcctgggcgacaaagagtgagattttgtctaaaataaataaataaaaaatgacacattcattcacttttctcctcggcctcataacattgaaacacacacacacagaaacacactttttttcataacttaatttgatagcatgctaggaaaaaaacttaaaaaggcaaagaagtggaagaaaggaatgctatagagagggaaagaaaggggtagggagaaagtttgaatcctatttatactacttagtagctgtgaatcctaaaccctctgaggttcagttttctcatctgtaaaatgggaatggtagtgttcaattcatgggattatcttaagaaattaatacagtgtacttgccaggggaattattgtcatttatgaaattatagagctaggctagaacaaagcagtggtttgatatattggagggagggagagagagagagaggagagaggagagatcaattgtaactagcagatataggttaagtagaagaagaatttgaaaatagaatgaagtaggaggattttagatggtgttccttaaacttcacagatttttcccctccaagcaattgggtaagacaaccctcctcctggcatccacccgtggtgatatcaacaagaaagaaaagagataactaatgattttggctagaactacaaaggaagacaatgtcatttttatacaagaagactctgtagaccggtgggcagagaaagagctggggttgaatggggtcgggagagtgcactaccatggccatttccaaatataagggctgggggacaggcttgtttattgagatgtggctggcaacaccttcctttaaaaaggcaaggttgtcagaattcgagagaggccaccatattctgaacaatgccattagaaatgttgcctttctgggaacagagcttagaggagttggtgtatttgcgggagggcactcagctagggagaagaccccaagccacagtctataaagagaggttggagaactgacttaactggtcaggggtagtgcctagacattttaaagttccccaggttattctaatctgaaaccgtagttgagaaccacccatctggaagggcttgagaatccagggctatcaaataaaggcatttgaaagagcatcgtgaagcattagcctggccatttggcccagaaccttagttgagaatttggtcccatacaatcatcagataaacatgagtttgagtatgatgatggaacttgagtttggaaagtaaaatctgtagaagtcaagatgctatttggtggcatcatttccttttttaggtattgaggtagacaatccttagactgttcataaacgtacagaggtcatttaataaagggcaaaaatgccctgagcacatacgtttgaaatagtatttagtttcttgcaacaatcactactcatgatggttttggaggcattatgaggagtaaagtcacctccaccatgattatctcctcagaaatgtgtgttcagaagcctctatccctgaagcctcaagggactcaatgcttctgctgatgaaatctctttcttaacagaataaaagaacattggctgagttgctttctggagcagttttttattctaagggctttgaaccacagtgcagaacattctaagagggtgggaattggtgggtatattacaaccacccatgttttttaagtggaagaatggaaagattagtgtggtcaaaaccctgtttttaatgaaagacttgatttttgtaaagattgtaaatatcgttttattaatgttgtagaccaaattgagcctcgagactaaagaaggcttattctgtttgggaaaacagcttagcaacaatggactttttcagaagtggagaaaagctaagtcttcatacttcatttcattcttccttccccataccaattttgatttgggaatctaccagatgagaatttttggtgaaaaatctaagctcatatctggttggtacgggatttcatattattattttttcttatctttgctttatatagcagagctaccatgaaattgtgggatctaaggtttttccagatctgtggctgatttgaagtatacacattgactgttttactgtgatgtgttttccagccatgtaggcaaggggcaatttgctcaaaaattgtacttctgtaatctcatctttcattccttaagggcgttaaacagtgcttttgccttagctctgaatggtgaggaaaacaataagcaacacctggaagcagcattgtagcgaaaagagcatggactgggttggggtttgaatcctggactttgccgcttactaacttaaattctctgagcctctgttctctcatctgtaaattggggacaataacaccaaatgtgggctgttgctgtggggatttaccaggacagcataagataattgaatgcatatacgacatctggtttttatatctggcgcgtagtaggtgctcagtaccttgtagttattattagtatattttatgttttatattactctgtctactgctgttttgcagtttaccaagtactttcacgtaagtgttgtgtcaagaaaaactctctcacactgcattttttctctactctcacactaccacagtcatcaacatggaagagaatttctgtgaccaaatgtatgggatgttttccccacacatcaagcagcggacaccagctgggtgtcctacaattcagttcctacctggagatagtgtcagatcccacaggttaggggctcagtccccatgactgttccccattccccaagacaccagtcacaagcctgggcctctgaaatttctgtccaacaggcttcaagttggggttcccacaaccccttctttgggttcaactaatttgctagagctgctagagcagctcacagaactcggggaaacatgtttaatggtctattataaagcatattacaaataatactgatgaagagacacatagggtggggtttgggggaagaggtatggagcttccataacctccccggggcaccaccatccaggaacctccacgcgttcagctatctggaagctctctctccaaacgcagccctcataggttcttaggggagcttcataaaatcagcattcctccccctgggtatgaggtgggaccctctcagaggaaggtcttaagacccacaatcagaaagacaggggaagatgagagtcctgccttggggcaagtgaaaggaaggaaggagagagggtgtatcacctgaggccttcccctgggccctaacacacccaacattatagcaaaagactgtaacaaggaatatgggagttataaaccaggcagagtggacaaatccaatctatatattgcatgacaccacaggtatctcatgaaatctttgagtcactccaatgaggaaatattttaaatgtaaggaaatgaagtctcaccacactgagcaggggcacaggtcatatgaaggaagaaacccgtggaacaaagatgtgctaattactagtgctgtgttctcatcatgaattgagggtggctgtggcagggattctgaaagaggctggtaagtattacagcccctgccccagagagaagcactttacaggtctgagtgcaggggaaagatgcaatgaaagggtccaaagctagcccttaccctttgctctaaattacaatagaaaagatgaaaaccaactgatgtggtttggctctgtgtccccacccaaatctcatctcaaattgtaatccccatgtgtcgagggagggaatgggtgggagctgactggatcttgggggtggtttccctccatgctattctcatgatagtgagggagttattgtgagatctggtggttctaaaagtcgcagttttggccaggtgtggtggctcacatctgtaatcccagcactttgggaggccagggtgggtggatcacttgaggtcaggaatttgagaaagcctgaccaacatgatgaaaccccatcactactaaaaatacaaaaattagtcaggcatggtggcatgcacctgtggttccagctacttgggaggctgaggcatgaaaatcgcttgaacctgggagttgcagtgagtggagatcatgccgctgcactacagcttgggtaacagagcaagactctgtctcaaaaaaaaaaaaagtggcagtttcccttgcatgctgtctctctcctgccaccatgtaagatatgccttgcttcccctttgctttctgtcatgattgtaagtttcctgaagcctctccagccatgcagaactgtgagtcaattaaacctcttttgtttataaattacccagtctcaggtagtatacttatagcagtatgagaatggactaatataccaaccaaataaaaaattctaccaactagccagatgcagtagctcatgcctgtaatcccagcactttgggaggccaaggcggatggatcacctgaagtcaggagttcaagaccaccctggccaacatggcgaaaccccatctctactaaaaatacaaaaatgagctgggtgtgatggtgcatgcctgtaatttcagctactcgggaggctgaggtaggagaattgcttcttgaacccgggaagcggaggttgcagtgagccaagatcgcaccactgtactcatagcctgggagacagagtgagactccatctcaaaaatcaaaaaacagaaaacaaaaaaactctaccaactgtatcatttctttaaatatactcactgtccctaaaacaggagcaagatcattcgttgtttcacaattggtatgaaatttatcatctacattggagaaataggaccaagattaaagagaggatacggttggggtcacgttcattgttttttaaattggcctcttgagtcctgcttaaacttcattgagtaaatttttgtctcttaacgtttttgtttatagtatcctataaaaagggttgtaccttggagagaattttattccaatttagttatagcagacatacataaaaaactttatttaaacaatgtacctaagtgattatgatatttatacataacaatgtttcatgttatattttctggacatgtgcggtttagaggctttttccccattctttctttttattaatgtgttttatttttattattttatttttttgtagagagggtgtcactatgttgcccaggctggtcttgaactcctggcttcaaacagtcctgcctcagcttcccaaagtgctgggattacaggcatgacccatcacgacctgcctccctgttcttttttggaaataaatgtacaatggcattttagcttgttgatatccgcaagcttgttaatatcctgctgagtttcgactgggtttgcattgaatctgtagatcaatttggtgagaaatgacctcttaacaatactgagtcttccagcttaggaacatgtatgtctctttgtttgattcgatcttctttgatttctttcatcaccattttatagtttttgtcatgtaggtcccatgtgtattttggtggatttatatctgaatgtttcttttttgggtgctactgtaaattgtactatttatgaaaattcagattctaattgttcattataaatacacagaagtgaaaccgatttttatatgttgaaaaatatatatatatataacttttttaaaaagataagaaaatagatatctcagatggggaaataatttcgttactcaaaaaaggctactgcatgaacgatgtgttaggctgacccaggccaggtgcttagcagtgcccaatatgtgctacatgtgagttctcatctgtcttgccttgtcatattctgtattgctctaaaagccaggctccatccaattaatggtagttacaggacttagaaccatgtgatagttaagctgtcaagccctggcctcaggcagccccgggtttggatcttggccctaccatatactagctgtgcgatcttcagcatgtctttcacaccctctggtcttctttttcctacactgcaaaatggagataatacatgataacattgtaacttgaccagagcccagtgcctggcacccagcaagcactcagtaagcattagctattctccttcttgtctttgttgttgttaagttataaggaggaagaggctagggaagtctaaggaagaactctctaacaatgcttatctaacactgggtcaggttgaaagggaagtggtgagcctcctatcacagaagaatggacaaccccctatctagaaaggcgcagggggagtcaggcttccctgagagttgctctatgtgttgagattataacacccttcatagcccacatggcgttataagcagaactagtttccaggtctccccagtcctctcagatacttgacccacagacacaaagtgtttgaagcagtaggcagaaatagtatccctgaaaaaacaaacaccgaccagacttatctttccatcagcggcagtttatgattgcacattaaattcaattgcttttctttaggaggctggtgcagggacccgtcatctctaacccagtgccatccattctagctttccccaggagcgcagacagaccagccgccttcctagtgtacactaattaattaatctcatgcttgtgattttatggcgcttaagtgctggagcatttctgtttattcttctccctgcaaagcacctcacgttgcataaagaccatgaatctccattgcaaacgccgtctgtcttgggctggagaacagcccaccggctgtctgttgtcttgctggcactgcctcttacagccaaagtaacacatccattaatttatccttaatgacattttgacatcccgatcagttcatcagatgtttcttttgcaagacttgtcccacacagccgggccagggtgctaggccactcttgatgcataatgcatgagacagtgcaccgctcagtaccctgtgacagacagatgccatctgctactctaagactgtatgttcctaatagccctggctcccagagtgattcacaccaatgccttcagagttgttttcttctatgcttccagctttctgtgcttgggagaagctggtcagtgcaaggagaggggcctggggtcacaaacatacatgcaacagtgctaataggagggaaagtaagggtaaatcaaccccttgctatagtcagagtttagagaagtcttcattctaattcaggtggaagaagggcctagggcaaacctaacatcttgaatcttatcattactctgctactacttagaaattaggatcatgaagacactctgataacaataatggatatcaaagaagaaaggaaaattatccttaatatcctcaatccaacacatgagccatccgcacatagatatacttcttcatcgttgtaatcacaatgtagacacatttttattttctagtttttttaacttaatgtaatccagttagcatttttccatgtcgttacatggttttcatttttaatggccctccatcattttaatggctgcataatattccatccaggggatgcactataatttactgaaccagttccctattgttagacatttacgaggctttaaccgatcatttgctattaaagaaaggcagccaagttgggtgaggaggagagcatgctctcagcaggctgaagagctaggctcaaatcccacctgttccctttacctgttttacgagtttaggattaacctttctgggccctgaattcctcacctataaaacaaaagaaataatcactaccttgttagtgttgtgaaaatcggagctatgtttaaaatactaagcacatggtagtatctgctaaatgttaaactgttacatttacctaactatgccagtagtaggggcaattctgcctacccaaaaagaaaaccattttgcaatgtctagagacatttttattgacatgcctgggagtagggggaactactggcatctagagggtggaaaccaaggaggatgctactaagcatcccgcagtgcactaggtaactccccaacacatacgtagcaaataattatctggcccaaaataccaacagtgctgaggttgagaaatcctggcatagaggaagctgtgtttccagtggtacctacatgatacatgtatattttccttcttattatttccttaggataaaattctagaaaaatgggaattgtggattaaaggatagatggtcttatgcccatctacagttttggggtggagtgggggatggacgtaatgttctgtgtgtgtgtgtgtgtgtgtgtgtgtgtgtgtgtgtgtgtgtgtgtgtatgtttgagagtctcactctatcccccaggctggagtgcattggtgtgatctcggctcactccaacctccccgcctctcaggttcaagtgattctcctgcctcagcctccccagtagctgggacttcaggcgtgtgtcaccacaccgggctaatttttgtattttagtagagacgggatttcgccatgttggccaggctggtctcgaactcctgtcctcaggtgatccacctgcctcagcctcctaaaatgctgggattacaggcatgagccactgcgcctggcctggatgtaatgtttgaggtgactgatgaagaaaagttggaagataaatggtatgtgatcccctctggggcagaagatggcattccatagaccagtagttctcaaaatatagaacctagcgtctcctaggaactcggaaatgaaaagtttttgcactcacccctgatttaccaaatcagaaactggtgatggagaccaacaatgcctgcttaacaaggtgattctgatgcacactcaagtctgagaatcattgccatgcactacctgcagaagaaagccaacttgtagaatagtaagtaggaccctgcttaaatacagaaatttggtgcagaaattgatgaaaagggtcaagtcgtagacacggggaagctcaaatatgggacgatgcaacaataaaggaatggaaagtgtcactcaatttattcattcattccataaacatgtttaaagcttttacaacattgtgggaagtgctaaactatgtgctaaaggaaatacaaatacaatacgcaaatatgtatattttgtaccttgattataatgaaaagtgatgagagaagataggcaaatgactgggatacaaaacagaagcaaggcctaccctatcacgaagagatcagaaaaggcttcctgaaagaagtgatgatttgaatgggatttgaaggacttgtgatcatctcttaatatgttaattcaacaggtctttacaggatacccgcttgttccaaaatctatgtaaggccctggggaattggtagtgaacaaggccaacaaggttgttgtccttgtggttatagtctagcagggcaatagccctgtaagttagccattcagcaagaaggagatgatgtttctagttggcaactgaaggtctaagatggggtcagggtgagaggaggcagttgtgagctggtgagagggagatcaccctggagtcctggtttgagatctgagaagaggtgtgggcatgtgagtgtggaacggagaaggaggttcactcagctgtagggaaatagccataaagcctcagcaaccaggagacgctgcttggaagcggttgcttgggataaagcttgaagaattcatggtcatcatctatccacatacaggctttgttgggatatagcagacagaccgaggaggagcatctaaagggtgaggccttcaggagacagagttcagctcagcctcagctcagcaaggaatggccctatatagggagctgcagtctgttaaagagctgcccacagaggtgatgagtttgggttgctggaattcagcagtcgggggctggatacccactggctggggatgctgcaaggagtctcctagctagggtgggaaaatgactgggagggcctttccagccagagaatccaagattctacaacttttaatgatgtgaaactgaaggtcaacgcatgaataggggaagagcatctgccccactggctggtttggtttcgggtcgtatgagcaggatatggatagagcaagatgaaactacagggaggaaagattagtcaccttggttccctagagtgctcatcttgggaagcagatcaaacataaaattaaaaatgaaagcaaggaaaaagtcatgcggattgctggggcaaggaaggaggataaaaaagaactagcatttgttgcatatctttatatgccaaagaccatgctagggaactgtcatcatttatcatttctcatcatcacagtaactctgcaaattagggtatattaaattctattctatagacgaggaaattgagtctcacagagtcacagaaatggagacctgatcatgattacaccactgttaggagccaagtcagtccagggccagagcccatggtatttctgcaacaccaagaacagaggggccatctccccaacccaggggttcagagctcagacagcattcattcagggaagctcccattgtctgaaccatgaattctggtcacactctgctttgaagcacttttttctttcttatcacctattatgtaacaaatgcttatgtagagcttatttggtaggtgacagatcccagttaagtactttcataattataagttagtatctacctcaaagcattgctaagagaattcattataattatccctatttgacagaagagaaaactgagttatagggaggtttagcaattgcccaagactatacatctaataaatcatggagccaggatttcagtctaggcagtgtggctccaaagtcagtgctattcctaggctctgctttagggcccaggggccagtatggccatgtacccagagggaggagggcctcacctgtgtttcgggctttctgctgctctgatttcactgctgggtgcagagaatggtccaacagggtctgactattgcctaagtggaaagagtgtgattggtaggagagcccatccaggccagagaggtagtcacaggcagaataaagaagcagagatagacagatagaggcacagatatggacagcaagatagcaaagcaatggaagtagaagaccaagtcctttggcctttcaaattgtcatgacgtctgttgctgctgctgttgctgctgctgttgcttctgtaactttgccatgctgggggattcacaagccctagatgagggtgatggggcaggagggaaaggacccaccagctatgccccagaattggtacccaacagaggcagtgagcagacaggatgctcattgcctgcaggacatgagtggttgtgagtgagttttctggccgcagctgtctatgcatgtatgtgcatatgtgtgagtgtgtgtttgcctggggagaaagggagacagctgagaaagctttaggacaaggggagatatgtgatggctttttgcctaagcgtgacataacagggaatcttagagaacatttagaagcctgactggagggtttgaatcctagctctgcctctgaaagcctgggtggctttccatgggttacttcaactctctctgcctcaattcttttatctgtaaaatggaactaataatactcctggcctcacggtgttgtagcagaattaaggaacttaataccctgtttataaaggccttgaatagtggctggtattcaataagtactctataatgtttattaaacaaataacatcaatttaggaattatggtcattttattagtttcctcaggctactgtaccaatgtctcacaaactagatgacttaaccaaaatttgtcctctcataattttagaagctataaatccaaaatcaaggtgttggaggggtcaggctccctctgagactctaaatagaatggtgccatgcctcttcctggcagctggtggtgcccaccagtcctccgtgctccttggcttatggctcatcactcccatcgccacctttgttgtcatgtggcattcttccagtgcacttctgtccaaatttccctctccttgtaaggacatcagtcatctgggaatcagagccaccctagtgacctcattttaacttcgttacgtctgcaaagaccctatttccaaataaggtaacattgacaggtactatggattaggacttcaacatatcttttgcggccagagagtgggtgagtggaacacagttcaatccataacaatcattttaaaagcatcagttgttgccatgattcttagatgccaactcccccactatagtgaaatcaatacacagagaggggaaagggagtgttcacggcaactcaatgagatatctggagatctggacccggcacccgggtctcttaccttctagtgttccattttcaagaatgaaactttactaattcagacctgctgaagagtgggcccacctacttcggtggttctcaaactttggcatgcagtagaattgcttggagggcttattgatcacctagagtttctgattcagtaggtcagggcagggccggtgaacttgcgttgctaatacatccccaggtgaagcggatgctgctggtccagggaaaccacacttggagaacagctgttccgcatcggtggtgctcaagcttagtggcacactataatcacctggaaagcttctgaatgcccagatgcccaggctgcaccccagaccaattaaattagaatctcactggtaatttttaaagctccccaaatgatgtgctcagccaaagctgaaaagcatggctctagactgcatcaatggaggtttttaaagaaaagtcattatccagggcatccacttcaaagtattcatatttaataaataatgaggttatttaaactaacatggatttttttgtatttaaaatatgatcataccagagagcatttattgagtgcttactgtgtgcataccctgggcaaagtggtttaccagcaacataccattcaatcctcccaacagtctgacgggggaagtactactctaatccgtgttttacaggcaggaggaaactggcatgcagagggctcagtaacttgcaagagcttgcacagctagtctgacatggagccagattttgatgccaggctgtctggcaccaaagccagtatattaactgctatgcagtcctgcctcctgatacgagggaaaacagtgcattctcctttaaatgctgcacacatccatatccctatttacactattgattcttttttttttttttttttttgagaaaaaagactaattgggtcatctttattttcctagcactagcatggtacttatactttgtgacttcccaacacattgaactcttttttttttttttgtcttttttttttttttatactttaagttttagggtacatgtgcacattgtgcaggttagttacatgttacatatgtatacatgtgccatgctggtgcactgcacccactaactcgtcatctagcattaggtatatctcccaatgctatccctcccccctccccccaccccacaacagttcccagagtgtgatattccccttcctgtgtccatgtgatctcattgttcaattcccatctatgagtgagaatatgcggtgtttggtttttttttcttgtgatagtttactgagaatgatgttttccagtttcatccatgtccctacaaaggacatgaactcatcattttttatggctgcatagtattccatggtgtatatgggccacattttcttaatccagtctatcattgttggacatttgggttggttccaagtctttgctattgtgaataacgccgcaataaacatatgtgtgcatgtgtctttatagcagcatgatttatagtcctttgggtatatacccagtaatgggatggctgggtcaaatggtatttccagttctagatccctgaggaatcgccacactgacttccacaatggttgaactagtttacagtcccaccaacagtgtaaaagtgttcctatttctccacatcctctccagcacctgttgtttcctgactttttaatgatggccattctaactggtgtgagatggtatctcattgtggttttgatttgcatttctctgatggccagtgatggtgagcattttttcatgtgttttttggctgcataaatgtcttcttttgagaagtgtctgttcatgtccttcgcccactttttgacggggttgtttgtttttttcttgtaaatttgtttgagttcattgtagattctggatattagccctttgtcagatgagtaggttgcgaaaattttctcccattttgtaggttgcccgttcactctgatggtagtttcttttgctgtgcagaagctctttagtttaattagatcccatttgtcaattttgtcttttgttgccattgcttttggtgttttagacatgaagtccttgcccatgcctatgtcctgaatggtaatgcctaggtttccttctagggtttttatggttttaggtctaacgtttaagtctttaatccatcttgaactgatttttgtataaggtgtaaggaagggatccagtttcagctttctacatatggctagccagtttacccagcaccatttattagagagggaatcctttccccattgcttgtttttctcaggtttgtcaaagatcagacagttgtagatatgcggcgttatttctgagggctctgttctgttccattgatctatatctctgttttggtaccagtaccatgctgttttggttactgtagccttgtagtatagtttgaagtcaggtagtgtgatgcctccagctttgttcttttgggttaggattgacttggcgatgtgggctcttctttggttccatatgaattttaaagtagttttttccaattctatgaagaaagtcattggtaacttgatggggatggcattgaatctgtaaattaccttgggcagtatggccattttcacgatattgattcttcctacccatgagcatggaatgttcttccatttgtttgtatcctcttttatttccttgagcagtggtttgtagttctccttgaagaggtccttcacatcccttgtaagttggattcctaggtattttattctctttgaggcaattgtgaatgggagttcactcatgatttggctctctgtttgtctgttggtgtataagaatgcttatgatttttgtacattgattttgtatcctgagactttgctgaagttgcttatcagcttaaggagattttgggctgagacgatggggttttctagatatacaatcatgtcatctgcaaacagggacaatttgacttcctcttttcctaattgaataccctttatttccttctcctgcctcattgccctggccagaacttccaacactgtgttgaataggagtggtgagagagggcatccctgtcttgtgccagttttcaaagagaatgcttccagtttttgcccattcagtatgatattggctgtgggtttgtcatagatagctcttattattttgaaatacgtcccattaatacccaatttattgagagtttttagcatgaagggttgttgaattttgtcaaaggctttttctgcatctattgaaataatcatgtggtttttgtctttggctctgtttatatgctggattacatttattgatttgcgtatattgaaccagccttgcatcccagggaggaagcccacttgatcatggtggataagctttttgatgtgctgctggattcgttttgccagtattttattgaggatttttgcatcaatgttcatcaaggatattggtctaaaattctctttttttgttgtgtctctgccaggctttggtatcagaatgatgctggcctcataaaatgagttatggaggattccctctttttctattgattggaatagtttcagaaggaatggtaccagttcctccttgtacctctggtagaattcagctgtgaatctatctggtcctggactctttttggttggtaagctattgattattgccacaatttcagatcctgttattggtctattcagagattcaacttcttcctggtttagtcttgggagagtgtatgtgtcaaggaatttatccatttcttctagattttctagttcatttgcgtagaggtgtttgtagtattctctgatggtagtttgcatttctgtgggatcggtggtgatatcccctttatcattttttattgtgtctattagattcttctctctttttttctttattagtcttgctagcagtctatcaattttgtagatcctttcaaaaaaccagctcctggattcattaattttttgaagggttttttgtgtctctatttccttcagttctgctctgatcttagttatttcttgccttctgctagcttttgaatgtgtttgctcttgcttttctagttcttttaattgtgatgttagggtattaattttggatctttcctgctttctcttgtgggcattaagtgctataaatttacttctacacactgctttaaatgtgtcccagagattctggtatgttgtgtctttgttctcattggtttcaaagaacatctttctttgtgccttcatttcgttatgtacccagtagtcattcaggagcaggttgttcagtttccatgtcgttgagcggttttgagtgagattcttaatcctgagttctagtttgattgcactgtggtctgagagatagtttgttataatttctgtgttcttttacatttgctaaggagacctttacttccaagtatgtggtcaattttggaataggtgtggtgtggtgctgaaaaaaatgtatattctgttgatttggggtggagagttctgtagatgtctattaggtccactcggtgcagagctgagttcaattcctgggtatccttgttgaatttctgtctcattgatctgtctaatgttgacagtggggtgttaaagtctcccattattaatgtgtgggagtctaagtctctttgtaggtcactcaggacttgctttatgaatcttggtgctcctgtattgggtgcatatatatttaggatagttagctcttcttgttgaattgatccctttaccattatgtaatggccttctttgtctcttttgatctttgttggtttaaagtcggttttatcagagactaggattgcaacccctgccttttttttgttttccatttgcttggtagatcttcctccatccttttattttgagcctatgtgtgtctctgcacgtgagatgggtttcctgaatacagcacactgatgagtcttgactctttatccaacttgccagtctgtgtcttttaattggagcatttagtccatttacatttaaagttaatattgttatgtgtgaatttgattctgtcattatgacgttagctggtgattttgctcgttagttgatgcagtttcttcctagtctcgatggtctttacattttggcatgattttgcagcagctggtaccggttgctcctttccatgtttagcgcttccttcaggagctcttttagggcaggcctggtggtgacaaaatctctcagcatttgcttgtctgtaaagtattttatttctccttcacttatgaagctgagtttggctggatatgaaattctgggttgaaaattcttttctttaagaatgttgaatattggcccccactctcttctggcttgtagggtttctgccgagagatccgctgttagtctgatgggcttccctttgagggtaacccgacctttctctctggctgcccttaacattttttccttcatttcaactttggtgaatctgacaattatgtgtcttggagttgctcttctcgaggagtatctttgtggcgttctctgtatttcctgaatctgaacgttggcctgccttgctagattggggaagttctcctggataataccctgcagagtgttttccaacttggttccattctccccatcactttcaggtacaccaatcagacgtagatttggtcttttcacatagtcccatatttcttggaggctttgctcatttctttttattcttttttctctaaacttcccttctcgcttcatttcattcatttcatcttccattgctgataccctttcttccagttgatcgcatcggctcctgaggcttctgcattcttcacgtagttctcgagccttggttttcagctccatcagctcctttaagcacttctctgtattggttattctagttatacattcttctaaatttttttcaaagttttcaacttctttgcctttggtttgaatgtcctcctgtagctcagagtaatttgatcgtctgaagccttcttctctcagctcgtcaaagtcattctccatccagctttgttccgttgctggtgacgaactgtgttcctttggaggaggagaggcgctctgcgttttagaatttccagtttttctgttctgttttttccccatctttgtggttttatctacttttggtctttgatgatggtgatgtacagatgggttttcggtgtggatgtcctttctgtttgttagttttccttctaacagataggaccctcagctgcaggtctgttggaataccctgccttgtgaggtgtcagtgtgcccctgctggggggtgcctcccagttaggctgctcgggggtcaggggtcagggacccacttgaggaggcagtctgcccgttctcagatctccagctgtgtgctgggagaaccactgctctcttcaaagctgtcagacagggacatttaagtctgcagaggttactgctgtctttttgtttgtctgtgccctgcccccagaggtggagcctacagaggcaggcaggcctccttgtgctgtggtgggctccgcccagttcacccagttcgagcttccgggctgctttgtttatctaagcaagcctgggcaatggcgggtgcccctcccccagcctcgctgccaccttgcagtttgatctcagactgctgtgctagcaatcagcgagactccgtgggcgtaggaccctccaagccaggtgtgggatataatctcgtggttcgccgttttttaagcccgtcggaaatgcgcagtattcgggtgggagtgacccgattttccaggtgccgtccgtcacccctttctttgactcggaaagggaactccctgaccccttgcgcttcccaagtgaggcaatgcctcgccctgcttcggctcgcgcatggtgcgcgcacccactgacctgcgcccactgtctggcactccctagtgagatgaacccggtacctcagatggaaatgcagaaatcaccgtcttctgcgtcgctcacgctgggagctgtagaccagagctgttcctattcggccatcttggctcctccccctgctacactattgattcttatgtgatgtagctcagcctttgcctcaattacagtaattctgagtcagtgggggcatagatgaataaagttttgctgcatttgtaagacactggaatcatgtgtaccacagactgaatttgcccttctaatctggaagggcaaatccctagaagaagcatggaggaatgtggagcaggtgtccacattcctgaactggcaggcagaaagcagggcttgcatcctacatgctgtgcatcttagctaagggactactctgtccaggcctcagtgtcttgtctatgaaatgagaagatgctatagttcccttacagttgcgatgtgtaactttaagctgagatctagtcatgccagcagagcatcctggattcaaagaggacagtgccagcttttagtagaagcagggcctcacttgtgaattttttttttggtccacttcctatggctgagatctctgactccaggatttcaatcttcatggtttccaggaaagtttatctggagattgcaatggaggatggcccagaggaggagccctatggggaagaggaagagtgcctgatcagtgtctccccaggagagtgggcatggctcccacattcagggaaaaactctaggtggaaccctgtagactcctgcccccaccagttggctggatggtcctgttcctagcccagaagagagtcaagggttttgcagagtccaaatcctgggatcctccaccacctcttttctaagtggtttcccagtctctacttgaacttctccaatagcagggagctgagtacttgcaaaagccaaacagggcaggattcctgtcttgtttttcatatcatcatctccttccttctaacagccacagattcaacgtacttgctcattaactatttgtccaacaaattaatgagcaaagaggagggaacttctaactttgggaaggaggcaaagacttctaagagtaggggacatttgagttgggccttaaaaggtgaagagaaggttgctaaaccagaaaaattggggaggggaattcaggcgttaggtgcttccaaaagagacctaagcagttctactttgctagaaattccttcgttgtgccatgttggtgtgctgcacccattaactcgtcatttaacattaggtatatctcctaatgctatccctcccccctccccccaccccaccacagaccaacatggcacatgtatacatatgtaacaaacctgcacgttgtgcacatgtaccctaaaactaaaagtataataaaaaaaaaaaaagaaattccttcgttgtatcaagccaacctggtcctcattctgcccctgggaccatagagacccaaccatcagatgcatgaagagaacgttactttgtattccctctccgtgagaaatgtccctggatgtttcacgcactcctcctctcgtagcatgatttccacacttttaacagcccttcattcctctcccgtgagccattctacctgccagtatcccttgtaaagagtggcactcagaacaaatcacaggactcatggtccatcctgggcccatcccctgccacctacccctccctcagctaacaagcgaaggtcagagagagctcaaagtgatccgttagaaggaaaatgccaagagctatggccgcgtcacctcgtcctcacctgtcagaagcagtaaactttggattgctgtgtcttaaaacagtcttcagctttggaaatgttcctgcaaaggaataaacagacttatgcatactctctttttatcagcttttggtaccccctgctggcgaaattgtgtgacccagttggcaaaaatctcaaagcaactacagaaaaaaatcctcagttcagaaagtcataagtacttgagttttgaaggctctgagaattccatgaattatatgatcatcccatgagtcatatgactattgcatgagattttttttttcttcttcaacatgctatagctgcagctattttgtgggctctgcgggggaaatctctgactcccatgaatattttgttaattctgcaaacattccaagaaggaaatgctaagttaccgcccaaaatatttctagttacgaatattccaggtcaccagctaattttatgcaggcgtttccttctctttctttgcacgtatctacttttaaagtggttgtaatttgtgttcagagtaagaggactatcttttctagactccaaattgcagacttttaagtataaattcgtgcaacaagtttattgagccatgtgccagacactcagcaagaaattggagtaggtgcaaagagtcaaaagccctttcccaagaagttcttgtcgtagtaggtgaaagagttgaatcactgcaatttgactcaacaagtacgtagctaacatggcaccaaaaccctccctgatctgctgccagggttcaaaccaggttctagctcttacatagcaacaggtatttcttcttggtgttcatcgtctttgtgatttttgtctctgtatttatctgtttaatgcccgtctttgccattagtcttcatgttccatgtggattaaggtcaagaagacatgatcttctagtatttagcagagactcatacatgtacatgttcaatggatgagtcaagcaagaggagaaaattataattctatgtagaagagcagggagaagcctcagaggagatgtgacacttacattgagccttggaggacaaagaggaggtgaccagtggagaagaagagggacacatcaaggaatatggagtattgagaaatagtgtggtgggaggaggtagttgatgttttctgaaaggggaggataaggttatgtgcagagaataagactgagttgaagcccagtccttagtttaagggtcttgtttgccctattcacagatttgggtttctctttcgttgagagagaaaaataatgaggtagtaaattaaattatttggctatggagatgaatgtcaatttttctgtgttactgagaggtctttttaacacttaaattcagaattctgaaagaatagatatagatccccaaactgtggttttgtgttttatttccttccacaaataccccctccatttccaccttgtagctgtctttgccaattgccataacatctatccatacattaaaatgattatataacattattatcaccatgaaaatacagagtcagccatcagctttaaatactaaggatgtaatatatctgatatttttacaattcagttagctttccaatttttaaatatgtgttttggggatgcttagtttttctttttttaatacaggtgttcagagctacccaaacatttctataaagtaccatttttcataaaagcagcaaggctttcattattattatgattcctttgaaaaccaatgatctgtgcctaagacaaccctttccatattactttaccctgaatggaatgagattggttgagagttctgcccctaaggaaatatcaaagcctccgaaacatactcatttatagttttaagttaactctcttatcagatttccttttatttcctgctggggcaatgtgagcagagctcagatagaagcaaagaatctgctatatttcttttcaaatttatgattaagaaggtcacatatacatttttaaacacactcctttttgataataaatgaagaataaaatttcaaaatgtcatcagaagcagaattgctcatttttctttcgttggcattcccccgcccctgtctaattgtctgaccaatccaatgcttcatttcttgttgtatatctgcctggaatcattttactggtagaacagtgtgcctgtggccaaagcattataatgaaaagatgcattcctcttcctgagtgcctttctttccccgagccaacttaaaaaaattagtgaataaagaattccattttaggctacatgtttctccaaattatggccaaaacgagacgtataaagaaactttctcggctgggcacggtggctcacacctgtaatcctagcactttgggaggccaatgcaggcggattgcctgagctcaggagttcaagaccaccctgggcaatatggtaaaacgctgtctctactaaattacaaaaacttagctggatgcggtggcagacacctgtagtcccagctactctggaggctgaggcatgagaattacttgagcctgggaggcagaggctgcagtgagctgaaatcgcaccactgcactccagtgtaggcaacagaataagacactgtccacacatacatacacacacacacacacacacacacacacgcaacttttctcttcttggttgggattcctggatccagttcccctttccacctttctctactgtgctctctgcttccagagtgcattctgtatgaagtctgtcaaaaagatcacttgccacttctgacttgttgggttcagctagtgagaactgccacaggcgaccagaggaagggcataaggtgtagtcagggcattttttttttttttttttttttttgcctctggttctctccctgtcaggttgtctatgactggctgggcctttcaagagaaagccgctgcttctgttcagggtacctccttttcacagctctcttctttggggctctggttactgcttcctctatttgttcctctggtcccataggtaataaacagctctcctactgaggcactagtatattatgggtccctatacatttgtcacctttatcagcagaccttttataaataaaccttcctcaaattgtcctcatttgagtatgccctctgtcattcttctgtgaagtctacacctagagcatgagattcatgtttcaaggaggatgctatcaaactggaatttgtcctatgtgaactcctctaaaacacttctaagctgaggtttgggtctttcttttcttttctgttttttgtttgtttgtttgtttgatggggtctcactctgtcacccagactggagtgcagaggcgtgatctcggctcactgcagcctccacctcttgggctctcaagtgatcttcccacctcagcctgctgagtagcacaggtgtgcaccaccacacctggctaatttttgtagagatggggtttcaccatgttgcccaagctggtctcaattcctgggctcaagtgatctgcccagctcagcctcccagcgtgctgggattacaggcatgagccactgttcccagcctaagttgaggtttatcctttccttttatacttcctctggcagggagattgttacctcttgaaactatctgtttcatgatcagtggggctcaaccttggaaaattattccctgtattgcactggatttgacctctctgggacagccctttttgtgtgttgagacaggacaggaatgaccaaaattgaatttgaagcctactgttgtgaaggatggagtaagagacttggagaaatttactctcaagatatctgatgtttaacctatagcctttcatgtgataagactataacagctatatttcgatgcatatatgttggaaaaagagggaccatgttcgctttttcgaaatatttgaataactcttatatgcaagaggagttagtcatatttttgtatctctaatgatatatctgagacctatccagttaaaatttaaaggacatagattttaaatccatagaaaagaactttttaactttttagttcctcagtgaggtcaaagtccacatcatttgaaagaattcagggagagatgggatcccacagtggggctgttggggagggaattccaacattagaatatagttggatccactggcaatagtagaaaaaacaagaatagcaactgctaggtgtctagtgtccactatgtgcgaggcactgtgctctgtgtattttatgcattgtctcatttaatcctcacaaccctataaggttggtcctgtcatctgccacagtatacagaagaatagttcaggatttagagtaagaaatttgccctgggtcttgcagctagttggcaggcagcagaggtaagctatgaacctgagtctgtctgacaccaaagctgatatttttaacctccagtggctggtgtcagaataacttggggaacttgatggccatgtagaattctaggtcctgtcctacttcaatgatcctgagcctctgtgtgtgtgtgtgtgtgtgtatttttttgtgactcttcaggtgattcaaatttacaccaaagtttgagaagcactgctctacactattattatcataatagttatattatgataatatccgtctggttctgagggtcttttattcccatgggaataaggttgcatcaattcagctctaaatttccttcttttgagctgtgaaactaacccgcacactcatccatttccaaccaccagcccctgcttcactctactattatttggtaggtttttgatgagctcagttcctgagaaagacaagcctccatttttaatctcattcagagccacagaaacagaaaggccagtctagccacttcctccctctgaaaggagacttagggaaaggaatacaaatcttgttgatttcctctgaaaggagagtgggggaagcattgtacaagtctcattgatttcccattttaggctcaaacatagaacacatgcattgtcgggggtgaggcagcagcgtgagtctcatatttctgagtaaatggaaaccattcatggtttgttctgccttgattctttttctggagaatgaaccagatttgggggttgaggatgagcattggggaagaacaatctacccaatgctttaatgcaactggcaccatctgactgtggttttttccccttgcacatgtcccaaaggaagctggccaagaagcagaaggagacccagagtggagcccagagggagatggggcctgtggcctctgccgacaaacccaccaccaagctcagcgccagccgcaatgatgaaggcttctcttctagttctcaggacgtcaacggattcagtaagtagagccaacaaaggggaaggggacatccgtggtccagctcagccctagtacttctgctgtgaaccccacacattgatcaggtgctgccaggcatagggtatggatgcttgcctgatatggactgggatgaaggttctccctgacaaagacttggggcagttcatcctaagatgaaaaggaatatttaaaaaatcttccccaaatcagatggaaatgggagcaagtcatcctaactgcttgtggacataaatagagacaggttaaaaataatagcagtaaaaaagaaagaggaggaggatggttatgtccttaaggagaaaaatatgccacactgaattgagtggcttaagattttcaaatctgtgtttcatatacaccacataaggtaggtgagtcacagattatgactgtctccactctgagtggttaggaaactgaggctcagagaagcaacttatctaaaatacaatggctgatgagttacatatttagattggaagcctcatccctcaaacatttgccagttccaccacagccagtgttccaagtagcattggtcaagggcacctgagtccttgtgcagtgttaataaaggatcccaagatttgggtggttaagatatcagggttaacccttatcctaagaagaactccaagactgccaacatctaaggcttccttgtggacagacttgcttctgttcttacagccattctatcagacagttaacagactagatttcccagcctcttccccaaattgggtaatgcaagaagtctcaaagaatctgtgcataacacagatgtcctccacataccatgtaagctacaaatggaagaacctccattttgtaaaaaatcactcaagagatgatcagtttgggatgatggggatctatgagaggataaagaaagaaagaaaaaatttatccccttctataatgtagacactgtctctcatcctcaccatagtcctgtaagatccttagtattattgttcccattttataggtaagctatgcaatgctaagtgtgtttggccagccatctcagagccacacagcttgtttttaatggatccagatctgagagtaactcaggcccatgattcctaagctccagtgtagcacagaacctacctggggaggttttcaacacatccatatctggaccccacaccttatctcctgaatcaaaatctcctgggggatgagaggtggggcccaactgagggatatggattttgtaagtcattcagagagttctcataggcacccagatttagaatacagcacttggacagaggcaatagctatgcttagatactgatgtactgtctttgggaagagagattagtttaaacctacaaaaatgttgagaagacagcaaaatgaatactcatataccctttacctagattcaccaactgctaccattttgcaacatttgcacttttgcacttggctgtactcaccctctctctctttctccccttatccatgttttttttttcaaaattttctgaatcatttagaagtaagttgcagacatcatgacactttacctccagagaattcagcatgtatttcctaagaactaggatacctcttcaacataaccacaataaagtataaccttacttcagtgatctaatataccagttcatagtcaaattgcctcaatgtcctccaaatgttctctattgcttatttgtttgttattttaatccaggatccaatcagagcgctcacattgtatttggttttcagctgtctttatcctctttgatctagaacagccctctcaactttattttttctttcaggatactgactttttttttttttttttttttttttgatggagtctcactctatcacccaggagggagtgcagtggtgcgatctctgctcactgcaagctccgcctcctgggttcaccccattctcctgcctcagcctcccaagtagctgggaatacaggtgcccaccaccacgcgtggctaattttttgtatttttagtcgagacggggtttcaccgtgtttgccaggatggtctcgatctcctgacctcgtaatccgcccgcctcggcctcccaaagtgctgggattacaggcgtgagccaccacacccagccttgacatttttttaaagtctagggctgtcgtcctgcagagtgttccacaatccagatttgtctaatttttttcatcatgataacattcaggttacacattttggcaaaaatatgacatagctgatatgacgtacttccctttacatcctattaatggacatatcataccgctttgcacattaccagtgatggtaagtttgagttcttcttaaggttagataatggcttttaaagacaaagtctaatggcacatactgattatgagcaaatatttaacatctgtttttcttagggatcagagcaaatttgcggtttgcctaaccatgaagccagtcctttttttcccattttcaatccagataaatcactgagactcatacatttcctagaagcagggaaattggttgttgacatagaccagggttgacaagaaaatgggcttgatttttccttaaaagaaaggaacatcctagctataattttgcatctgtaaaccaacctctgttgcaaaattacaggtagctaggaggaataagttctaatgttctattgtactgtagggtgactataattaataacagtttattgtatattttcaaatagctaaagcagtggattttgaatgtttctaacacaaaggaatgataaatttagaggtgattaatatattaattaccctgattattatacattatatacatgtatcacactataccccataaatatgtatataattagtgtcaattaataataatagaaaaaaagagaaaggctcatcaggagctcactgagtctctggctatgctaagttgtcactggatcccctgctttcggctctggggcagagaagttcatttgcaagttcatctgattgaaaatactggtcaagtaataccaattcatccttttctgtccagtccagcctcttgtgcacttttttccatttgtaaaagtaccctgggaggactcttaaaagcaaaatgattatggccaaaacttcttgacaatcattgtgaccctgaaattttagatattggttctcaatctttctgatctcaaatgcaaacctgggtaatactgatttcttatgtttcaaaggataacattgtcactgttcgctatgggccaaaacttagacccttaagatgaaaacacccaagactgaaatagtttaacttgccataaaggaagaggagaaatatccagtgaaatctaattagatgttttaaaggccagggacaaacttttcaaatgattaaggtgtgtatgtatgtgtgtgcatatgtgttttatatttacacagacacgtaaatatacagagagaggtataaacctacacagtcatatatacacaaatatacatatatgactgtatatatgcattcatcataacaatattgctttctaaaatatttaaataatgattgacttattatactcaattattagaaaattctgcattagtctgaatcactgaatacgttaggactctctatgcatctgacgtcctcaggctacagctacaaaaacactctcaggatcttttgactgccctagaatgcatcaggtacctttaaaatgccctgtggaaccactgggatgagatttgagggggaaaaatgtaagtaatgcttacactggagatgagaaattgcttctgaaatcaccctgatgtatgtagaattgaatctatttttgtggcattagggaagtgactgtctggcctctgaatcggtgtctttaggaggccctgagattatgtacaaatgttgaggcagcattgagaggtagggcacagaatagttgttacattgcaaaagattacagaagaacgtgccttgagcaattatttcattattgaccaggtaggccctagcctaattcaaattctacctgtccctgcataggtttattttctggggttttcttttttcttttttttattatgctttaagttttagggtacatgtgcacaacgtgcaggttagttacatatgtatacatgtaccatgttggtgtgctgcacccagtaactcgtcatttaacattaggtgtatctccaaatgctatccctcccccatcccccaccccacaacaggccccggtgtgtgatgtttcccttcctgtgtccatgtgttctcactattcaatttccacctatgagtgagaacatgcggtgtttgatttttctatttcaagtgactgctaagttctgtgacatctattcaatcaaaccttctaatattgtataggaacaatgacctccagggctctagggtgatggggctttgtcagatatgggccattgctttggagtgccttggtattcttgaaaaaggagtacgtgtcacatttcaaggacaaacaacgtgcattgttttccatttagagaaatgctagcttttattaagtaatctgattttgatcttactgccctgtgtacttgttatttttctctgcgatcttttgctcactgggatcattttctgggtctttcttctggtgcttaaatcttcttctttatctcttttgttcacatgtcatcttcttgttcattttcagtccaaacaaaaatgcttcaaaataaattccttttgaattcctgtgatatggggacttggtagtctgctcttcccataatggcatttgacagattaacttgcctactgggtaccatgagttaactccgtcctgatttttatgctttccctctattgaattattccatgtctggaaggtaaaggcagtccttctctaagggtcatcagacagacactgggccatctagctctctgctaagtgtcaccttggagctgggatttaatggactttttctcagtacatgcctacccctgtgctgtaagccatgtggcacggtctggggagagaggtagtttcaaagatgaataaaatgaggtattgtatcacaaataatacatggttctacttgtaagcctttcatagtttacgaagtctttctgcaaaacgctccactgcagcaatagttccttattcctgtaggaataaggtagctagtaggtttttaattattcccattctacagatgaggaaactgaggttcagagagctttcatggcccaaatcatacatatattgcagagtcgtaatgagaatacatctctcctgatttcagttagagtctatccatctcattctgcaaagaatttggggatatatccaataaaagaacctacaatttaaaaaatagtgagaaaaataatcagtatcaggaaaatgtgaaggtcaggaccaggatatattgaaatataactatattacattaaaatgtaatctaaaatatgcactctgataattttaaattccactttggctctgggatttctagtagaaaatgcccaaagaagaagataacttttattgggcacctactatgtgctaaaacttatgctttatataaattccactctgaagctcccaaggaaccctatcattagatattattcctattttgtgaatgagaaaattgagcttcagagaactgaagtaaataagcccaaagtcacacaatgaagaaagagtagggatagaattagaagcaaataaggctctctgactcctaaatcagtgttccttctcctctactgtggatggtagcccaacattcaccagtctcacagaggaaggtcactgacagccgggagaaagggagaacttcacttccttactgataggtcagctggcttttctaccatgtgggcagaagctgctgccacagctgttttctgaacagaggcctgggaccaggtactggcatggagcctagcagattcccacaaggtgccaggtactatgataagcatgctcaaatatggagtcttagtcattctctcagtaaccctgtatagtccatatgattattatcgaattcattttgcagttgaggaaactgatgctctcagatattaaaagatcttcttgaagtcatatgacaaatagataatgggccctggaccccagagcagatattctactttcaaaaccaagcaactttgtctttcctttgacctttagcggtctctctaccatgaaggcgagtgaaggagagacaggaaatcaaggtgaaatagactttctggctgggagaacagtgcttcttactggttcctctattccctgaaactcctgcctcaggaaggcagctgccaagtggatgtacgcacagacaggttctgccggaatcatcctactaggaccctcttaggaaagtgggactgcagaccagtagtcccatccttacgcatcccaaagctagaccaatccctgggtagttatagagagagaggagcaaagaatggcccctgcctaacagagagcttgcagcctggcagtggagacaaatggttcaagaaagagaacctttgttacaggactttgtgcaatggaagcctacacgaagagccacaggaccctttccctgactttgtacctcccaacatgaccaaaatataccaggcagccagcacacagtcaccttaagaggtattttctgccaaagaggagggtggaccctgaaacctgatattcttcctgttctttaccacacagacctcataaaagggtttctttgtgggcagttcagagaatgttcaggcttggtactcccttgggatggttcagtagagatgaggcaggcagaaggaagtaccaggcaaaattttagccagattattttaggaacatgttatataactaaagcaattcaaatagggaagacggatcatggcttttaaaacaatagaggctggctggggtggtggtaaactctttgtaaagattccttaaccctttcaggaaaatggccagctggctgggaaatgggtctctgggaaaactggcctgaccctgatcttctctggcaaaaactcttgacttgatggtgtgtgatgtcaaggattgctacatttgcttgggactctctctgggtcagtcattttgctaggtgctgttcacatattgtctctgatcctcaaaacaatgcaaccagttaggaatcattatcttgatttcataaatggcataattgatgaccccaagctaagagctgtattaaacactgcatcctaaatcccccacccctcattgttgttgatcagtacataatgacagttgcccaactctctggcccatcagatactcattgagtacttgtttgaatatatgaatgaatgaatgatggagctggaattcacactcagatctagttccaagcccagacctggttccatcttttctcataatgtattctctcttcaattaagccaaaatctgtcctctgtaacttcattcattcctgcttttgtacacaaccatgtattagtcagcaaccacgtgctggcctttgtctgccctctggtgtcacacagggtaatggaatcagtgcttctcttcctgcagcacccacaccctccccagctatttgactgcagctacctctgtgcccaggtccttccctcaggctaaacagtcactgcatcagccatcagccctcctcggaataaatttctgtttttcagtctgctcaaaatctcttttgacccttctgtctccatttggtccatgcccacggaatgtgtggtttccaagacaaccatgaccctctacattgggctgagtcactgggagttcagagagctaccatcaccctcactctgatcctaaacctgggtttaaaatatatcactcatgttttaattaacctctaaatattcatcacgtgactgcctaatgtagaaatcatggcttccagctagggctgcctcagtcagcccagatgaagatgacttttggggcccaaatcaaagattttacattttgtctgttctgtttcttgttaggtttgaccctgcttgccaagcctacagggctattttttttttttttatttctggttgtgtcagccaatcacttaatcctcctagtctggggccttgaaatgtaggaattactacattgttaatatttatgatcctagttattatatacagagcattaattatatgcccatttacgtgctgagtgttttatattgtataagcattcttatctcattggtatggtgggaaaattaagtaagtgttatgattatacctgataatttaaaggtgaggaaacaggctttaaaatagtaaggaatttgcctaaggctttgtagctttaaatggcagagctggaactcaaacctaggtcagcctgacaccccgaggcccttagtccaagactactcctccatgctgccttctgtagatgttattattcccatttcatagacaaggaaacttaaggccacagacactgagtcatctgctcaaagcagtggttcttgaagcatgatctccagaacagcagcatcagcatctcctgggaacttgttacaagcaaattctcaggccctacctcagacctactgaacccaaaactctagggttagggccaagcaatcagtttttaacaagccttccaggtgattcagagaatcactagctcaaagtaatgcccaggactgtcagactcaagcccttcttctttatttgcaaagctgtctttcatgatagtagaattatggcctctctgggagaggaaggctctagctcacctccctgggtagatgaactaagaggttattgccataggagtactggacctgaagggtgctaaagcccattaatagttatgagggtccccgaatctgggaatctcaaccgtatctttgattttgtctccttttgtctgaacagtgaacaatctaagagtcaggatggaaggagtggaaatttacaaggaaaagcaatgatgagtcacacactgaaatcgagagctcaacagagcattgtgaaaaagaactcaaagatgcaaaaatcctgtttgcaggaacaattatattttcaggttgctccaagattaaattgaatctgggagaagaattgaatgttacaagcttgccccctccagttttattgaatatcttacaggaattattgaatattttgcaatcatccacttagctgacagattaaaggacacacttattaagttcctggcaacccaaagttgaatggaattgtttattccttagcagttacaaaatggaaatttaggcagccttgagaaagttgaccaattttccatcacaaacactaaggagttaaattaagacaagttttagagaagaatattagactcaaaaaagatataatagttatacataatcaaactaaaactaaaaattaccttagatgttattgatccaaacttctcatcttaaaaatgaacatttgagttgcagagagttttcccaagatcactcaatgagtcacaagtagaaccagctagaattgggcccgtggcctttaattagggacacgaccgttctagttttgtcccacggtacccttcaaaggaatgaagtacagtcaacaatggtttgtcttctatgtaatattttctgtagactcctaatctgatttctgcataaatagaaccttctcaaattgaattatacttttcatctcctggttatgggagtagctgaggtgttcctttaaatattcaatgaatgccgactctatgccaagcattttagggattgtaaagataaataagacatggtctctgcctccaatgatattactgtcctctaagaggagagttgtaagtggattagtttcaataaatgtgataaatgatagagaaaaggtgtgtatagtgtcccagaaacactgatcagacacccagcaagtgattaattctggctaagtgatttggaaaatacgatgtaaggagatggattttgatttgaaaatagtgcaagagaacagattgacccaggtggaaggggcaaaagcttggaaatatgaggtgtgaggtctggtggactcagagaagtgggtttgaagtccaagatactctgtgtcaagaatgtatggccagagacgaagctggaatggtagctggagcctccttggaaaggacttcacatttgtgtcccatttaaattcactttccaggaagggtaacctgcttgggaattggagtgatcccagtgtcagctgtccttgtgtgattttggaacccagcttcatatgctctttgagttgtatagatccagctttctattgtagataagcagagtgcattttatcagttacagaccttcactgtcattgtcagctggcccaagcattcctcaatacactttcaaagagacctcagtaaagttacaaggctgaagttgctttttgacaatttatcctaggccactacatcttgagaagaaaatagaattgttctctacacctcacaggtggtcttgaattataacagagcacttaaaaagtgcttgttaaagtaatcagggataaagaagtgatgttgacgatgtaaatatatagttgctaggtagcagaataaactgagcttagagaccaatttccccccctctgctcaaagctacagacttgatgagttgaaaacatagataataattctactagctaacattttgtgagtaattgctggacaaagcactttctatgcctcatttcatttaatattctcaacaatgctatgaggcatgttatggaaactgaggctcagagaacttaagtaacttgctcaaggtcacatagctaccgagaaaccaagcccagggcttgaacctagtttcacatgatggacctatcacgcagcccctccttctggaaacattttctttgcttgacttttgctctccttgtgttttgccttcctccccagccatttcttctcattcttctttactggttctgtacttgctcccaacctctaatcattgaagtgtccccggccttagccctgaagctcttcctttctgctcatactcactctaggtaggtggtgatgatgccaaatgagatagcacaggaaggggccagatttgaagcagaagagggggacatttacatctaggccaatcgatttgaggtgttattgagtcatggaagagatgccaggttggcagtggactctggggcctggagctcaacagaggagcctggcctggggatataaatgttcactgcattttgtatacaatgtgattggagactttgccatgaatagggaaactgcggcccacagaggtgaaactcattgcctaggatcactcagcaagttaatggaagaaccagaactttgagccaagacttacatataggaggacctatagaaaagccatcagttaaagctcagggtataacatcaaaacagtgggctataaatggggctgtgtaaatgtggtccaagtgcagagcattctggaaatcacctggatcctgggatggaactcagaatgtgtgaaggagctgatggattagaagaccccatcaatatctactcagctggattgtgataggatctctacattcaaagtagaagtttacggcaagaacctgaggtctggtttatgtattaatggttgggagtggatctaggaaagtcaatggaagagccatagggcggactatcacaaagattgaaaagctgcatgtgaggtagtagaaggaaatagcaaagggccaaggatgggcaaagcccctatgctcagtgcatcaccatttccataattctctgggttgcttcctacataattttgaaaagggttccatgatgtttagttactcagcaccggttgacttttagtgagatgctcttaactaggtggaaagaactgcccaccccaccagacatcaaacacatctcaaatctacactcacctgtagaatagacagatgttaagtgagcacaagattccactaaccaaaataataaccattagtagcataagaaatggcatttctactctcaaaaagcccatgaaatagggaacacagataatagttatatgacttggtatgcccagtagaggtgtgtgtagaagctgccaagagaatgttgtccagtgagggtgggggagctgtcgtgatccattaacctgtgattcatctctgttcagatgatttacttttcaccttaccaatcatatgagttgatatcctaattatatggggctgaaaatgaaataaaacttcaattccccttaatagcaaggatacattcaggagagatgtaacatagattaatcttgacacgttcctctctctcacctcccacatcgagttcaacaccaagttttgatgagtctacatcttcgatatatctagaatccatctattttcctctatatccactacctccatccttgtccaagtcatcatcatctcttacctgaataagatccacaactcctaaataatcctcatatccatccgtgtcattctgtagtctattttttcataggagccagggagaccttttcaaggcaaatctaaacacgttgtaccactcatccctgggttaaaacaattcttttgcttctgattgtttataagctaaagatcaaagtccccatcctgacttcacatacaggtcttgtccttctgaccttccccaggctctctcatctcacttcccctttctctgtgagctccgtgacaccataatcttctcacagtacttaaactttgtcacactccttctaccacaggacctttgactgtgctattgctagacagagcaatggcatggtcaaaggtcctgtggtagaaggaatgtggggtggaagtgtggtagaaggaatgtggtagaaggagcgtgggatgggaggcccataggccaaatccagtgcactctgtctttattagaataaagctttattagaacacaaccatgcttatttgttcatgcatttcctatggttgcttttgtactacaatggtagagttgagtagttgccacagagaccacctagcccacaaagcctaaaatatttactctctggtctttgacagaaatgttttccaactcctcatctagatcactggctatacccatgcttttctcctaattgattcctttagacctccattcttacatttcttcctttcctgacccccttctcccttcaccagattggatttcttttgttaggtgctatgacagaattgtattccaccttttttctcagcaacaactgcggtttgcaaatgtgtttaagacttgacccctctactagatgggaagctgaagaaaggaggaccatgtttttgtttactactgtatcctcagcagagtgcctgacccctctgttagatggcaagctcgagagggaaggaccatttattttctgcttattactgtatcctcaacatgtggcacagcatgtggcacagaatgaatacctgaaactcttgttgacagatgggtagatgaatagttggataaacagacaagacttaggtatataaatcctatatactcagagaaaactaaaaggaatatttagaaagctcagtacaactgacatcacacactattgtcctgttttcagcgttcagaattgaataaaggtggataaagaaatcaagggatgatgctttgccagtcagatgctatctggatcttagcctctctcccactcctgccatcacccactgtagccaacactgaagggaattttacaaagccctttttatggttcctacaaaaccagaagctgctgctcaaaatatcctcaagaagtcaaccatttggatctgggaatctgatacaattagtccttcaatcataggaataggaagagaaatcagctggtgatcttcagaccacatacaaatataggcagagattcagataggctactatatggccctcccgatggaagaaccaagaaaaatagtaaaggaaagaagcatatataacaacagatgtgattcttgattggatggatgaccctacaggtagccatggggacaacagtattctgaggaggttctgggagatgatgggcacctgttacatgggtttaatctatgtggtcatggatacctggcttttccacaccacttgtcctggcagccaagatgtttctctagttattgaaactccgaagtaaaaactgtgaggtaaaaaggaagatatttggaccatgctggttttctaggtgagaggaagccacgatgagttgataggatatcaaattcttctaggtgagaagcagccaggatgagtttaataccagcaggaatgagctgggtgcagtgactcatgcctgtaatcccaacattttgggaggccaaggtgggtggatcacctgaggtcagaagttcgagaccactctagctaacatggcgaaaccccatctctggtaaaaatacaaaaaaaaaaaaattagccgggtgtggtggtgcatgcctgtaatcccacctactcaggaggctgaggcaggagaatcacttgaacccaggaggtggaggttacagtgaaccgagatcatgccactgcactccaacctgggcaacagagtgaaactctatcgagagagagagagagaaggagaagaaggaggagaagaagaagaagaagaagaggaagaagaagaagaagaagaagaagaagaagaataagaagaagaagaagaagaggaagaggaagaagaagaagaaggaggaggaggaggaggaaggggggaggaaggagggaagaaaggaaggagtggggaggggagggaagaaggaagggagggagggaaagcaaaggaaaggaaaggaaagaaataccagcaggaaatagaatccttaaggtacttcaaggtgatcaaagaaaacatcatagagaagttgaatcttaaacactgtgtggtcagaattagtcaatgcagaaaagaagaaataagtgacatggtgtaacacaccatatcacaacttaacagtgtaaaacaacaaccattgtatttggcttctaattctttgggccaggagtttggataggttacaacagggatagcttgtgtctgcttgaaaatggggagcctcagctgggatgacttgaatggctggagatgactgtgacagctcttgtaggacaacatgtctgggacctcagttcttccttaggtggcatctgtcagggatggaaggcccaaatgcctccctcatttgcatattcaacccctatgctaaaatgactgtaacatctagggtaggctggaatcactctctccctatacatctaccttaggcttcctagcaacaggacagactcatggtaattgtacttcttgcatgatagctgtcttcccccagagcaagtgtttgagaaagccaggagaaatgctagtcctcctaaaaactaggctcagaactagccagcttcacttctgctgtgtatcattattaaaagcagtcacatattagcctaaatttaagggagtagaggagcagactcaacccttctataggaaaaatggcatatgcatataggaagagaaggaatcaattgtggtcatcctggtaacaagctatgacattattctaaaataaaagaatacatatacaggggcatagaggtgggaaagtctacttggctaatatagtcaataataggaatattttcaaaacctccattttccacttggattagcgtgataattctgctattacaagcaagtagttttgtggtctctgcacattttacaaatctatagcttttgctctcttgtacaattccttgtgagtataaatgtattccctaacatccagagtccaaaagacatcagtaatgttaacttcttcctatatcctgaaagacagggtgaagggcaggggacggtgttagcgtctctgtccatggtgttggtcttccttgctgttaggttcccaggaagacccttccttatgttgcacttaaaattataagtggattggcttctctgtagtacttgaaatattagaaccataggattaagtggtaaaagatgaacctgaagaggtaagcaggaactggggtctcgaatactagggagtttgaaatgtattatgtttctgcaaggagctaacatagattttaagaagtagaaaggaaggattgagtcggttttagaaagatcatcttggtgatagtgaggtaaaagttttggagagtgggagtggataaagctttaagtaagtattgtttctgcctatatcagacttcaaggaaagtgacagcacaaaatgctggtgcacatggaaatctgattacacacacacacacacacacacacacacacacacacacacacccgcttgtaggattaacagtcactacaacccaacgggtatggccaactctctgtaatgaagcaatggtagagagaaggtgttctacggcattccattcttgaaaccatttttaagccgagtgtattgactagatctccctgcttgctccatattgtattgattagtcagtattttgagggtgtgatacctggaaatttttggacatgtttgactttgaaatgagtgttcttattcagttaatgtctcatgggaccagttgagtttttccaaggtgaaaccttttatcttcaggatctttgatctaggttagatgaaattcccactgatgtacagacatgacagaggctcagaacataggagtcattccaaactaacagtcacttctgtctcttctgcagtggagacccaaatggtcatccagtgaatcttcagccagctgtgttctagcaaatacacacacttgcaaatctggtccctgtcaccctctctgtaacccttcttattctatcccatcattctcctttcatattgatccatcagcagaagtataccaataactcactatctttgttatgctttatttatgaaatagccatttgcctagcgtgttcttcaattttaaaaaacaaactcacaatgccactgctcaaccaaaaatccgttattggcttcccattgccctccagatgaagtaaaaattaacctcgtggcctacaaggctcagaatgacatgacttctgtcagcatctttagtctcatctctggctactctctgtcttgctcaatatactccagtcatattgacctccttcctattctttgaaaacactaagcatttcccaaaatatggctttcacaattctgtttgctctttccagaacagtcttccactctatatttcactgtttagccactttttatccttcaggtctatgattaaatgtcttcttttgagggattccctaaattgtctatctaaacagtggccacttgttgtttttttttaattttactacattctagtccctcttagcatgtgtcagaaatttcttgtatgcaaatgtttattcatttaataattttttggctaatgtctgtcatcttcaccagacttttaaaccatgattgcatagacaacttctgtccgggcttctactatatccctggagactagtatggtgcttggcctatgaatacgattgagtggtatttgttgaatgaatcattatgctaattttaagtcaggatagatcacaatggttcactttcactattcagtattcagtcaactgatcttatgcattgctgggacaatgaggacctgcagacatagcgatgactagggttactcttagattttaatcccatagaggaaggttgagggaggaggacaagggaggggaccattgcactagtctgggagagatatatggtgcactttgcacctccatttcttagaaagtcctaatcctggtatctttgtcctagtcatcagttctaaaggccccatcaccaaatactggcttccttggactctctaccactcagtgtagccctggaaaacagagggaacactcttcagacccactttgtgtcccctactgcccctacccttgtgatctcccctctctcctccagagggctctaggcttctagccttttacacttccccagtcacagcttactcttctccaatttcatgcccttgtgagccttcccaatatctggcataatctgaaaagtcaatttactcttacgtattaagggatgtatcatattgtatttaaatgggaaagtacaagaaactaatatttattgagccctaactgtgtgccaaggactatgctagatgctgtgcatatgttatatcatttaatccttaaaacctatgagttgatgattattgttggtactaggcttctttcacacatgtggagattgaggttcagggagattaaataacttgctcaaggtcacatagctattagtagtagagctaggatttaaacttaatctttctcttgcatatgatcctactactataatgtactccctcccaaatagtgagaaatatgcggacacctctgaagccactaagtaagaggatggcatactgggacagtggtgtcttaaaatcagaggatataggctcttgtttactccactgatttctaagattgcactactctcttcagaggttagagtgtaacaagcttctgaacatgctgccactcatttattcaacaaggtttgttgagcacctactatgtgcctgacatattatgcacttttaatatacatcagtgaagaatacagaaattaaaaattccctgtctttctagagcttacattccattgatggtaggaagtggaaagagagacaggaaataagcaatggacagcaaaagataagtacattatatgatatgacataataacaagtgagggtgcactgaaacaatagaacatgctgaatgggatcaggagtcataagtggaggaggattgcagttttatagaagatgacatctgactaaagactttaaaaaggtaacagatgtgagccatgtcaggaaagagtgtctctattagaggctcccaaggcaagcatgtgcctgatatgtggaagctagaaccctgttccagctgtaaaggtcagtcaaaaccagtggaacccataagaaatatggacttctcctctaaatttagatcctttcagaaggtaccattgtaaattaaatgggttgaaaccatggtgcttccaaaaaatagtgaagacccttgtgcctatgagagctgagtctcaccactagcctagccttctggggtaaggagaaaactctgtaatctttgacttccttgtttatgacaaaacacgtctatctgcaggaatcttcccggagccaccgcatccaggatctgtccttggtgctgaccctgatcttctttagctcaagatgatctagcattgatttctgcatcttcttgcccattgctgggttctgctattactacagctggctatacttggctattccatgcctttctttaggctagtcacccatactatcatcatggtgattgctccagccccccagattccggtacacctaccccattcagacttagtcccttggccctgcttggcaaagagcccagtgtaatactgttaaggatgttagctggcacagtcacttctgtcattgttttctgaaagcatcattgctttttcaactgaccctaaatgtggtgagggtttagtcaccattccaaatcatttatttagcatgaaaatttattagttaggccattgtttagcaaattcatcacattatattttttacttagcattatcacttaattagcgttttattactggaattggctgtcaattatgtggctaattcattgtcttagggaatggattttttatctgcgtaaagcaattgaaagtacattgttaactctttaacgattaaagattgttgtcaatggcaattcatgtgataaggaaaattaaaccatttactttccttgaaaaatcagatcttggaaaactctttggaaaagtgtaaagagggtactttagaagctttcatgaattaaaaaacttttattaagtgaatgccttggaatacttggcaaagctaagcaaagtcagctggaagattttgactggactccttggaatgaattattataatatactctcatatgtgtatatttaaatgttctttcatcgacattacctcttttggttctcacaaaaacattgcagaatgatattaggatttgtggttggcaaactttaagatggccccaatgatccctgcctcctatgccacattcttatataacgcccttcctcattgcagccaagatctagtgactggcttccaatgaataggatatgataaagtgatgagatgtccctttcaagatttgtctttaagaagactgtggcttttatcttgggtgctctctctcactcccacttgtctgttccttgggaagctagctactatattgtaagttgacctattggcaagaaatcgagggagatgcccagccaacagccagcaaggaactgagtcccatactgcagtagcccatgaaaaaatgaatctgtcagtatcatgtcagtgattatgaaatcagttaacttgaattctctcccagctgagtcttcagatgagatcattaccacagcggtcagcttgagtgcaacctcacaaaagaccttgagccagagatacacatctaggctgcaaccagatttctatctgcagaaactgagatcgtatatgtttgttattttaagctgctgtggttgggggtagtttgtcaagtagcagtggataactaatacatggcttaacatgtgagatgttaattaatttgcccaaagcctttgactaataagtagtagagccaggatttaaccctggttcttctgatgcatttcaatagacaagaagataggaattacagtccagacctctcattgcagctgccagggatcctcaaagctttgacatcccataagggcaactattcagggactgtttccctgtaacattgactcccttatgacttgcacacctttattactatgagaatcactaggattcttcagaggctggcaagcaggcttgaaaaacagatcttctggctgggcacggtggctctcgcttgtaatcccagcactttgggaggccgaggtgggtggatcacaaggtcaggagttcgagaacagcctggccaacacagtgaaatcttatctctactaaaaatacaaaaattagccgggtgtggtggcaggtgcctgttatcccagctacttgggaggctgaggcaggagagtcgcttgaacccaggtggcagaggttgcactgagccaagatcatgccactgcactctagcctgggcgaaagagctagactccatgaaagaaagaaaagaaaagaaggaaggaaagaaggaaggagagagaaagagagagagaaaggaaagaaagaaaaaagagagagaggaagggaaggggaggggagggaagggagaagagaaggagggagacagacagacagaaagatctttaccatgttcccaataaggaattgggtcaaacttaccattcttcttccctaggtgctatcctgcccccccataaaatggttataacagtagttcccaaaacatgactggccccaaactaaagccactaaatccttatgtctagaatatggagcaaaggaatctatatttagtatgttctttgaatgactcttgtacggtactagcatttggaatctactatataaaacaaagtagtttggcatttcagtgatcagcctctataattcagcacctgaggatcagccaggctgaaccttgatggggacacactgctttattcattcttatgagagtgttaggtatctgttctttccagggttaaggccatcagatttaattagttgcattttttggttggttttgaacaatactaagctgtactacttcattcattcagtaagagcagaaagaataatgtttgcttttttaagagaaattccaggacctttaaagaacacattgtatcttttaactggaagctcccttagagaccacctaatccctcactactcaaggtgtggtccatggaccagcatcatcagcatcacctgagagcttgttacaaatgcaggctctcaggccacacttcagcccactgtattagaatctgcctatagaagatctctagatatgtacattacaccttgagaagcattggtctaattcagctgcctggttttaaaattaaggtccacaaaggtgaaggtaattgtgcaagataatttagtggtaacaccaggatgaaaactcaggtcttgtaactcccaaactgtgttctttccattgtcttaatgtcccgttgtctttgtagttcataatatccacaaactcagcctaaatatccagggcatagtttgaaatggagaaaggaagcttttatccacccacaacaatggcaaactctttcaaacatctgttgcacatttaaatttcatctttcagacaagtttagttatttcattttctctttcttgcacatcaacaaaagacaaagtcacctgtcaggctgaagattgtaaaaacctgtcaaaattgagtttttctagtttagctaagtattactctgcaactattttgcattccttagtcttattataatttttatgaatgagagatagaaaataggagcagtctgtattttcagtgtgaggcattacttagtcttttccttctatcacacatcttcccataagtgtgcaggttatggagtttggtgatatatacataatacaaaattctgggccagttgttttcagtgcacatacaaccctggagccaatgagaaactccaaatcatgtccagtcccctggagccacagtgaagctgaacattttcactctgagagaagagcttcggatctgagtgtagttaaaatcaccagaagcccatcaggagaagatatgcattttgagtaaatgtggcttatcaacctccccacactcaccaaggcaaatggaactgaggcaggaaatagagatcatgatatcctcaccaaaagaattagaagacatgacagatgaaccttgaagataaacaaacattgtatttatcaacaaggtggagggtggatttcagagagcaaggtgtacctaacaaatgagtgtttccagagtaggcactagattctggagatacacgagtaaacaacacagatatgatacctgtcttcatggagcttacagtccggtgaaggataagatactaatctcactattattcaataactatagtaattcatgaagacgatgtatgttcaggaatatacatatattgtaattcatgaaaatgatactgttaggatataacatgggaccctcagatggggatggaggcagacagagatgtcttccttgatatcttcattcagaaaagttaaaatacttttagtgaccagtcatcccctagattctactattaacattttactatatttattttattacctatcttcccatctatccatccttcaatccatcttaatttttatgcatatcaaaggaaattttagacatcactacacttccctttcctcccaatatttaactgtacacatcattaatgccgactcaagagtctggttttttcctttgagataaaatttacttgcaaaaaaacacagaaatcttaggttttccattttatgagttcaacaattgcatacactttgcaacccagccccctagtaatatacagacttgccaggaagatccctcatgcccattcccagccatcccctgcccctactcaacccaattggtaaccaccattcattcataccacagatgggtttgtttattctagaggaggaattgacttgagctgagtgctgaaggatgaataggagtccacgtggccttggaagtttgggggaaaagttataaacactccaggagaatagcacgtcctgtacagattctcaggtgggcgagaattcagtgaggagacagtgtggctgcagcctagaggggaaaggacagagagacacaagatgaggcaaatgagattggtgagagctagaccaatcatagccttgaagccatattaaatatcttaaatctggaacatagccaaaggacagtgggcatccaataaaaagtttgagcagggaggtgacatgctcagctttggcctttgaaaaagttctcatgccttattttggagaaaagaacatggagaaggaagaggggattcaaggagttgtaaggatgttgtttcagccactatggatagggaaagagaggggcagcagatttgaggatcctggccatggagagaaatgactatctcttcttctgttgtattaacctctgatgtgttgaacttctaacaattataacctctgatgtgttgagcttctaacaattataaatcagtgcttgattttctctttctatctccagttttcagagatactagccataaaggctttgcagaaactggttcagagagattgagtaacttgcccaaaatcacacaggcagtaggtgatggtgtcagggttctcactcagccctattcatgtccaaagtctgtacgtgttagaccactaccctgtcttcagagagtattgtgtgagcctctcagtctttcctattggacttgccgttttcctcaatatatcagattcttcaaacactctagaattttcaaggcagaagactgtccgagttgctggcagtccctgtcaacacagggccccactttgaggataagttcacctgcccaagttttcctttaagtgatggtttgagaataggggcaggtgagtccacatggatctatcaataccgggttttatttatgctggtagtggctctgtgaaacacagaactgacatgcagagtcgctttccatttcttgtgcttgctgcctcaatcaatccctttatctataactcagatccttcctcatttaatcccagtctttccttccatataaactcctctcaaatgccacacccttatcactcccttcatgcttgcaagaatattaaaactgtgtgatttacctttctttattatttatgctttgagtaacttactgaccaagacatgttcttctaagttcttttgcatatgctatttatcttaacaagccatagtcacatgcagaacttcttactgaaagcatgaagtaactttccaataatattaatctttctaacactaagccaccttacagtttcatctactttaatatacttcattctcttctgaaaaataatacactctctgggaatccattctttgccaaccaatatttgtactctactttatcatcagtttataaaattctttaggcgtatatttcaatgtctatttatgggttattcttctaccggtcaaagttcagcattttttaaggccattattttcaacaacaagtgtctctgaaagtataaatggatggtgaatatgcaagaattaaataatcaacctacatgttaccaaaaagggcttatatttccagtgagttaaaagacttaaaaagtccataattatatcccttcttctttgtggtgcaacaaaatacttccaggattccatgcacgcccctcagctttattccctcacttcctagtttgatcactaagtggttaaggccagccacagagaatccctatcactactaaacatctgttgctctggcaaactcaacgacctttcattttttttccaaatgtattgtttatacaacctatgctgtggaacactggtatcagcatttttgctgcctctttcctcactgattttgatagaattttgacaaaaagaaaaaaattattttgaaagttttttaaaaaatagtgaaacccttttttgaacaaaattatacctagatgtttattttctaaaacagataaaaagccatttatatctggttggagaagaggtaagggaaaactcacatgcttgccaggatacacacactccccacacacatgacatgcacaaaaccctttattgtggcccagttcactccagacacatagaagaatctctgaacagaggtctcctttcctaactctgcctcagctcttagggaactaagtccatagactgatgctttgcttattgcttcctctctagaccagatgggtgaaactttccacttgatttactcaaaatgaaaataataaccgctagtcactggaacaagtcaagattgatggcccttgtagatcacaagagcaaggccgtcaaaggaatgacaccctctaaaattgaacagtgcacagcatgtatgaccagccacatattgtggtcctgtggaagcctggattaaaggagcatcaggaaagatgggatcccagtttgtcgatccctagcggagtttggcatttcactgagagacaattcttttcattattgctgcagtctcccagaatctagtaaccaggtcttagtgtagaaagaagaaactcagcgctagtgttccattgcatgagaggtccttgtgatgtaaccatttctgcatcttgactgtgatggtggtcacacaggtctacacatgggataaaattgcataaattaaacatacacacaagcgcatgtaaaactaatgaaatctgaataagatcagtaacatatatgtcaattttctggttataatattgtactatagttacacaagtgttaacattggggaaaactgggtgaagggtatttaagacccgtttatgttatttcttacgattgcatgtgaatctgtaatgatctcaaaatatgacttcttttttaaaaagctagcacccaggtgatgggctggtgtttaccagctgaccctgaccacgtccatcagagtcttgagatgtgtctcagggcttctctggtcattaatcattctccagtctaagcctgggctaaaaatgttctgtcagtctctaacaactgtgaagtggcttatttgtgtcttttttccttaatcattttttggcagaggtttgtctaatttgttggtgttttcaaaggaaagagccagcttttgctgttttttttcagctcctctgctgtatctttaacttgtgttatgttccatgtctgttcttatatacatatttactttctttctattttcaatgactatgtttttttatctcaagaagttgaatgtatatttttcaaacccacctatcctttttctgtcatgtgtgcattattgcaatggttcatattccttcttttttctctttaatcaatctaaatgtatttacttaatagtctctttgattgttttattattttcaattcttgagaggtgtatttttctgtgtatgatgacttctgactctctcctatggggataagattccttacaaggctcttgtcattctttataatttattttttactatgagttcgtctttagtggaggcagttttgttctgtgggaattaatgtgccttggattatgaaaatacctctacaggatgatttctcatttgcttgtcaggacagtgtagttttcagtggtattacacagtttttttaatgttgatttctatgttggcaggtgcttctatcaaacaagtaacaaaatttggatgccagatgcacttgtactagaagtcagggttttcttttgttttgtttttttatctctatttgaatcctgttcattcttcttgttatgctagtagttgatgccttaaacacacacacgcacacatgcacacctctacagtaccctgtacagtacatacacattcgcttaaaattgtgttcttcaattaagagtgtcaggattgaaatagtacacattgaatatccattatgaaaggtgaagaagataatatacttttattcctagtgatgtatcagtcacccacttcctggtttttgttaatacaattggaaattttagccaagaatttttatattagatttttaaatctgatttctctttaagcattacctcttatagttcattctgttttgattcacatttattgtgatttttacactcatatctgtgtttaccaaatcaactttttttataacaagacttcttccattcttgtggatgtttttttctctatttctggactcacatccttgactagctttatcagctacccaaccctctggaaaagaatcagagccaacataacttcttattctttatgtgtcagggaatgcctttctgtagcttcgcaaatgaaaaactatttactgtataattttttagccacatcatttttacttgaaaaattttgtttcattgttttctggaatttaaatttgggcaagaaaatgtatgagtaacgtagtttctgattttttatacatagccattttccagcctagatgtttatctgagtatttctacatcaataatatttaaacaattgtatcagaatataggctctatttttaagttgtaggtggagaactctttacacgtgaagatttaagtttttattttgccaatgagttgttttaatattgtgtcctgataagaaaggacacataatgtgcttctgttccatttattctgttcttctgtaacagcaattatgtcttttatatgtttgttttcttttctctaaaaatgtctttttgttcccttcacacatgaacacacatgagcagatgatatatacaaaggaaatatacattgtattgttctgctttccttgcgttttaatttccaagtttttcaaattaattctccacaagcctgttgcttattctcattacagattccagtgcccattttaattctggtattgcattttggtttctttacaattgtttcttacctcacccagtaaatattttttctagctacttcttaacttgatctattttgggaaaagtctgttgtcttagtcttattatttcacctttaatttcctttattcttctatcttttctcgcatttcgttttcaataaacttcaaggaacctaaaatgcacttctactttctgttgtttagattaagataccagtaacagaaaaaaaatgaataaaaatggcttaagcagcaagttaatgtattatcttctagaacaggaagtcaagtgttagagttggttgaatgagatgcccatgaatgtcattgaggacccacattctttcaagctctcctcttcatcatcttatcttggcatgagggcaacctcagcccagctcccctcatggatgcaagattgtttcagcagttccaggcatcacacacagacatggtactgtctggtggcagagacgggccactggattgtccttcttagagataagagaacctttcctagaagccttctaatggaacttccctcccatatcatataaaagatttttatttaacttgcaaaaggtatcggaacaccttgatggcgtagggacatcagaatttgtcccttgttttgggagtagggtcattccctgcccccgcccccaccaagtcatacggtgaacttagccagaaaataacaagacaggggatggctcttgggtcaacagtcaatactgactgttgtgtgtgtgtgtgtgtgtgtgtgtgtgtgtgtgtgtgtgtgtgtgtgtttgaaaattgtacttttcacggtatccaggctatcactttccttactgttaacatggtggattttcttctaagacctcatattatcttgtttctgtttatttaactttaaaggaagagaagtctctccagacctgttgcttgccagtaaatagaggaggtagatcctcatcgttgcctcactgtccaactagttattgttggaatccttttattccataccatcctggcatgtgtgatgctgctataattcatcaatattcctcccaaattctggcagtggtttaagcaagaggagcaatggatgtttatagcccccatccctacatagagtgtctaacaccatccttccatctggtgtgagtgctgtgaaagaaggaattcatactctcccccacaagcaggaggattgatctctttatcagaaacagtaaatgaatcctagaagcattttcccatgactgttcccatcacaattgcttcctaacactgaatctgcgtctcggaaacaaagataccatcttttgtctttaccatgtcaaagaccccagtgatggaggtttaggaggagaaagagcttggaaatgccccaaccctgctatatggttgatacagtctttgattctctgagctcaggaattaaaatgagaaaattggaagcatttcttttctgttcttcaggccattgggtttgctttatcccaagtaacaaagtctatcaaagtcaattgtatcatgtttgtttcagctccatagaaaatggcacagtggagtggcattctattactattagttctacaagttcaaccctactatgtgtttggtcagacataagaaagatgggaaaaggtaaatccatctgttgttacattgagtaagaggatgtgaatctactgttcctcaggggtcacaaatctcatacacctatgctagtgcaagtctagaattcagaaacacagaacagagcattcttacaacatgactcctaagcacaagccaactgcttcatcttatgcttcaacaaggaaatgtaatcacttccagcgttggaggggaaactacctgtggttgaatcaattgagagattatgttgaatcaattgagagagggattttcgagaaatttttagcagttgaaatatatatcttcctgcacatgggatgtgtgctgctgcaataataaacaagttttcttcccagattctggcaataggttagtggatagacttagatttcagagctgttacaagtttattatcttgagccttttctagtattttgtgagggagaagaggggaggcactgactgccagccaggttccaccttgagatttcttccagtggaatcacatttaacccttgcaacaaccttctcagaagaagatgatgatgatcaatcatgatcattgtcatcaccatcagcaattacaaataaagaccttaggctcaaagtatggttacccttgaacaacatgggtttgaactgcacagctctacttaatatatgaattttcttctgactctgtcactcctgagacagcaagaccaacctttcttcttcctcctcctcctcctcctcctcctcagtctactcaatgtgtagacaatgaggatgaagaactgtatgatgatccacttccacttaataaatagtaaatatattttctcttccttatgattttctcaataacattttcttttctctagcttactttactgtaggaatacaatatataacacatataacatacaacatgtgtgttaatcagctgtttatgttatcaataaggcttctgctcaacagtaggctattagtagttaagttttgagggcgtcataagttatacatggattttcaactccacagagggttggttcccctaacctccatgttattcaagggtcagctgtaacttatttgaggtcctatagctagaaatctgtgaagatcacatttgaatccaatgttttatcttcagagtgagtctgtgctttgactctgatacctgctgttgccacagtccccacagtgttggttccagttgcatccccactctgtgcaggtgacccagcctcctcttcacctcaaaacttctctcctcttccagactctctcctctcaatgagcagtcgctagctacttacacatcactcttcatactctcctgccctaaagagcacatggagctaggatgaatagtgatagaagaaatacattgatactggtaaggaactacaggaatttgattagctagttaagaaattttgtcttgactccctgaagacttttgctaagaaaaatgacttgatcaaagctctgtaaagggaactgtgaaagaaggaagggccatcaggaaactgatggagtagtcctgtcatgaagacctgaatgagggcaatagcagcaggaatggagtaaaatagatggctttggggtgtgtcataaaggaaagcagagaggagacaaggaaaggcgaaagaagccctaaatgactccctagatgccatctctagtgtgtggattctcatatgtccaatatgacattatgcacaaattcatcagaacaaatactggtttttactgcttcctggataccagacactgtactgagcactcagcatgcactatctctttgaatccttacaacatgtgttttctctgtattatagataaagaaactgagatgcagaaagatttgtcacttggccaaggaatgatccaaaccccattctatctgattctgggacccagactcaacatttctcagggtgcagattgagttcccctcatgcaacatgaacagaccccccttttttttttttctaagatggagtcttgctctgtcacccctggctggagtgcaatggcaccatcttggctcactgcaacttccacctccctggttcaagtaattcccctgcctcagcctcccaagtagctgggattacaggtgcacagcaccacacctggctaatttttttgtacttttagtagagatggggtttcaccatgttggctagactgatctcgaaactcctgacctagacaatccgcccacctaggcctcccaaattgctgggattacaggcatgaaccaccgcacctggccccgacttcttctcaaatagttatgtaaacattttagtgagcactaaaacaaaattagcacatcacattcatgattttatgttgcactatcattcataatgaggcaaagttaaaaaaaatagttgagagtttatctgaagaaaagttttgaagatgtaattgtgtagatctgcattgttcaatacagtagccactggccacctgtggctatttaaattgaaataaatcaaaattaaattaaacattcatttcctcagcaccagtaggcacatttcaaagtgctcaatagccacagatggccagtgactaccatattgaacagtgcaaatatagaacattggtgtcaatgtgtaaggttcttttggatagtgctgggtgagagctgttttacactggatcagtgtctttttatttagcatttactccagctctaaattacctctctttagaacttgatctggctctggataagtctgtgtgcacctgcattgtcccatacattagcctaccatttaccagtgtctgttgaatcctggaaatatggccagtctgaattgaaatgtgctgtaagtgtaaaatacacgttggatttcaaagcttttgtgtgaataaagaatgtaaaaatatagcattaataatttttgtgattatatgttgaaatattatttcagacatatggggttaggtaaaatgtattattgaaattactttcatgtgttctttttcgccttatttaatgttgccacaagaccatcttaaattacatacatggcttgcaatatatttccactggccagtgctattctagacctctttgccccactgtgtgactctagaactctctttctttccctatctctttctgtatatctgcactgcccaatatagtagacataagccacctgtaaatatttctatttgaattaattaaaattaaacaaaatttaaaattcagctcctctgtctcatcagccacatttcagacgctcagtagccacatgtgattagtggccaccaaattgcagagcatagatgtagaacacttccattgttgtggaaagttctattggacagctgtcacatagatggtacacaactatggcaagagacacagaggtggatcatgaatgcctaatgcttggagaatgtttccagattgccaaaccccatggcacatccttcttccatctcttaggggcctgtctcttcctatcttaggcttattcacgcacaccttatattttcttctcccctccttcaagggctgtggcctgcttatttctccctgaacatacctccctgctgtatgaacacaatatctaacgtgcattgtacagtataggtactcattaaatatttcttaaccagttggagtggcaattcccagtaagtgatggaaatatgtgactaaaggtagagggagatctatatggctggtagcagtggggcaggggataagggtgggcagcagcggtgatgaatctaggatcccaaggaagaggaggagagagcaggaagacagcaaagaggaaatcagtgagacagtaacccaaaatctcatacacagcaccaaaatccttctgcccatcccacaagctcctcgcgggcagtaacaagagttactgcaggggaattcacagggttaggtaacagctatataaaaagtgtgaaagaaatccaaaatattattgcacgataaataaacataccaaacccataaatcagaagaaggcatgagaattaaggggctggtgaggagaaaaaatgaaaaatcctctgtccctgggccagctggtgtgagttacattttatgagcagcgtgtgaattccagtgcccttgttgaattagcagcagaatcgcacattagttttaaggctccctcttgaacaggaacatcataacgtcttttaattgggcctgataaaaacgtagcattacttgtaggttcctgagagaagtgagttgtgaaattgggttttcattaaacctaacgatggaaaattaagtatagtgcgtctggtgaaatggagtgtgataaaagacatcacttctgcattatcagaggttaataagggaataggtgaggtaagatactttggaaaggggagtctaacccgttggattaataaaccttgaaaatcccttggttctgagtcttcatagcatcattagcactggcattgacattattgcaaatgttacagcaatacaagttgttaaatttcaatgcatttattttccattccagtgttggttttgctgacaccaagtttacagtctgtctagcaatgtgtttagggaaaatatccatattgacagctatttggttttggaaacatttgacatttctcacacacataaaaagccaagttcccattcctaggaagcctgtctttcccaggcagctggtctcccatgcagcccatgccccaagttcctctgggagactgtgggtctctgaagacaactgtccccatgtttgatggtagctttggtgggaaatactcacaggcctcctagcattgactcagctcatcctttcatagaaatcatagagtatggcatgactccaagctttaggtatgcagcatccatacctctgtggctcttgccatagctttgtaccatctctagatgaatcaaacacaagtgctcccttcctctccatttccaatcacaccatcacaggagtgatattcgctggaaggatgccttcgatgagagctattcatgacagctgggacacctacaagaaacagtgtgagtctttaaagaaggagattcctcctaaaacccttcagcaggttcacactggcttcaagggtcttgcacattcacagtctctggatctgccttgcaccatctgttacagtgttgccctcccctgacatttctacccacagcttttactccttatcaacctccttgttcttaactacatgtgccttcatctctcaggctctgtcctttttcttcagttgattcttctcgtctatttccttgctagacagtcaagccttgagggtggaatcagtatttctgtctgcattgccactgcctaccatagtccttggcacagagtgggttctcagtaagtcgaactcatgaaaccaaggggttgatggagaaagggaacacccccatgtttgccaagtggtacatttaagcaatgccagtgaacatgtactagctattacctaaaatcccgggagaaaaagtaagcagtatttctctgtgcagtcaggaaggttttgctaacgacttgcctaggcccttctttcttgtgcataaatctaaatcttagaaatctttctgtaagcagtccaggggttatttggctggtccccaaaggacagtctctcctttggagatgtttacctaccaccctgaattaggaagttttagagaccacactctgcctacgatgaccccacctactaattaggtacgaccccatcagtgtctcaaagtcagaccagtcagattagtagcctctcctcccttggtaggtggaggcaggcagaaggctgcaaagtgaaaaatttatcccctactccaaccacagatataagtgaaagcattagggtgaccaaccattcctgtgtgcccatgactgagaggtttcccaacagctgtactttcaatgttaaaactggaaaattgtcagtcaaactgggacaagttggtcacctagaaagcaggaaggtcaggtgttcccttccattatctttccttgccaggaacaggcttgccgatgctgctgccgagaagtagagtgtgcattcacacacaggatccatgtctgatggagtattccaacatgacaggcaaataagctgaagggcacatggattttgaaaagacaagttgcagaaaattgggaatatatgctaaacctcccagggaatgagtatggcataggccgagtgggtacctgcataggtgttttgcagggtctgaaaacatctgggggagacacattaactgctgcagctggcagttctcatctcttgcatgccacaaacaagatggtctggggcatagactgtccatgtctttggaaggaggttgggaagaccaagcctagatggttctgggaaaggtaaactggccctgagagatcaagaatgtatgcctggcagggaggtggtaagcaagaaattggttctagtcgtccaaggggaacagaagaattcaaacccaatctgaccaggcatcagttttcagggtgaccaaactgacagaaggcagttaaagcaactcattggatgaaaaggtttttatcaagagagaatatagatcctacatcagggagagattttatgaaggcgatgagacatagcatccaggcccggggaaagtagctagcagcactgaaggaagaggcccaggcttccctatctgcaaagtgggttcagtgatgccactggattaatagtattaagtgatggggaaactatacaatagcaagaaggtggtcactgtggcagagctcataactagagagagcagctgggagggtcagggtccctgctagcttctggcagtccaagactagccccaattcttcccagggtaaaactcaaaggaaaaaaaaatagtagagaagccaggtcacagccatgcaggcaaatagaccagaattatacatgtgactccaatcttcgagtacctgaggccacctgaggctctcctcccctgcagacaggcatcaggcactatttccagcctctctgcttccgaaacaggagggggctcccaataaatagcctgcctagcttcttagtggttctgcccaacaaagtctaaacgaaggactgagacagacggggatgatgaacaacctggaactttatcagtctgtgcccttgaaatgtgttgtggtcattggtttgcttgtgggtttgatacttagatctaccaacacagccaggccagggaaggagtgtatctccaatccttttgcagtttccctatcagttgagtcccaagttggttccctctgccctcctcaggccaagctgggggagacagggaggacaaagggcaaagcttctataggtgatgatctgttctgcctccttcttttcgaagcagatggcagccgcggggagctttcccagcccaccctcacgatccagactcatccctaccgcacctgtgaccctgtggagatgagctacccccgggaccagttccaacccgccatccgggtggctgacttgctgcagcacatcacgcagatgaagagaggccagggctacgggttcaaggaggaatacgaggtaagagaccagcctgtggggaaacttcctgatagtttcagaggcttatttgggcactaaagccttgctacaaaaagtatggctccctggccagcagcctcagtatcacctgggagcgtgtaggaaatgcaacatctcaggccccatccctccctactgaatcagaacctgcattttaaccagaaactaggtgatttgtatacacattaaatttgagaagcaccatgctaaataattctaagacatcctttttcactcttgtttctctccccttcccctttcattatccaaagtttcattacctccaacgtttctgcactttggagtctcacctccattcactatgccagaatggctcaagctcccatcccacatgctgtagaaaagccagcacatctcccctgccaatgatttccagcatgcatgcttgcccttggtcacctcttgtctcatactcaagcttctgtggtattctggtccccgctcccatcccccgaaggcaatgcttcatctccagtgaccacagttccctctttctgcaccatctcttcaccctgcactgggcatccctttcccatctccccaaagcatccctaacacaaaggatttgcaggtagtggttgttaccgaggtttggggaataatagagaaggactgcagtaaaggacaggcagcagctcaatacaacgttgttcttcttataagttccttaaccatctacattgctggtaaggccttctaaggttctggtctcctgacaggtctctatctaatttctcctcaaagtcttctttactgtcttcaaaacttcctccacccccacccctcagcatccagacaaagggcaccacgttcctcttttattttgcagaacaatttagctttctttatctcactctttttgtttcaaatcctgcccattaggcctcacgttttacaaacaaaaagcaaaataaaataaaaggaaaatgcattaagacgtttttctgaaccaaagagcagctcactctccaagaataattctgcaactctcctggttgcagttagactccagctgcagccagctttgaaaacaagaatttctttcttcacttttcctttcctgtctctcccttccctccttctttcctaaaatatcttttgagtatcttctgtgtaccatggtctgagttatatgtatttgtggtttttttgttgtttgttcttttttttttcttcacatgcagcgtgtgccccagctatgcttgattcagttttgctgtgtgcagtagaaaactcattggctcagactccacacatttggaattcttaatattgcagactaagtttatccctcagactatattctgagaaagagcttacaaagcaatatttctgaagtcgtatgaggtcatgaaattgtgctaaactgggggtgcagacagctggattccaatgtagtaagctgtttgattttagaattttgctatctgagttttaaaattctttattagtcgaatgaagaatttggataaggtgatctctcaggacctatctggtcctaaaactttatgagagtgtaaaacatggtgacaaggggcatgtttgacatatttataagaacaaaaatgtttatgtcaatggatgtaagtaattacaagcttgggagagctagcacttaatttcaaaaacggtctaagtaaaatagcacttttcatattctcatctacaaatcttgaaaggatattcgaattagagttgaagaagatgatctcatcactacccatccctggatctcatttcctagggggttgaatggtcccagtctctgggacatagggtgcatgtgagcatgctttctgtgtgtgtatgcagacctgcttgttgaacaaatgtcaggaagattatgttatttggtaccctaaaacttaaagtataataataattaaaaaaagaaaatattttcaagccatatatccaagaaaaaaaaaacaagattctatagacagcatggccttcagaggatgggttatattttaataattagcaagaaagtgaggaaggcaacataggattgggaaaacagcctccaggtggcatatctcccaaaagaaactggaagtatgggaggtggataataaatagctgtttgggtgaaaaaaaaaaaagaaagaaaggaaatggtatattcaacattagtcataacaatttgattaaaaatttcaaatatcattaagggagatatgtggcttaccaaaaaaaaaaaaagggacaagtagccaaatgctgagaaacacatatgtaagaacttgcaatctgaaatttgaagacagaattacaagtgtatttgactactttcatgcatttcgttctagattaatatttcttttaaagcattcatccctgtgtggtgagttgcttttcaaactttcttcgttgtacccttttgtattttccaaactttctagcatggaaatgaacagcttttataatgagaaaacaaacaatacatgttatttcatcatttgaatctcaaccagaaatctaactaggctagccttggcctcaattagtccaaattatattaatcagcaagctgtaaagcttagcttctagttaacattattttctgattaactgagggttaattggaaaatattgcctgataaaagtcatttcacaatgtgctagcccgcaatgtccagcccagaatacagctggattgctttgatcatcaaggctcctgtgatatctcggtaatcctcctgagcataggagtcacagatctgctaggagaatcattgtcctattgcagataaaagactcctgagcctccagtgctactctcataccaacctgctctgtgctgtttgttgcctgtcacttctctgctctgttcagtgttttcatacacatgagtgggtttgacaagttgacatctaagggacatctcagccatagcaagctgcatcagaagacaaaattcaattcagttgaataatcacttaaaatttgttcagtaaatatgtactatttactattcccagggacaattctaggtatttaggatacaacagtgaatgaaacaaagattcttgcccttctgaagcttgtattctagaaagggaaataggaaataaacataagcttaaaaaaataagcaaattatataatgtagtgtgttagacagtgagaaatactgtttgctatgttacaaaccactccaaattttaacaacatgaaacaaccaatctcttgcattcattgattctgtggaatctgtgcagggtacaacagggacaacctgtttcttctacacagtgttcagagccttggctaggaagtctccaaggctgggggctggaatcatctgaacatgtcttcactcacatgtctagtgactgatgcaggctttcagctgggattgtccactggaagacctacacatggcctcttcagtggcctgggcttcttcacagtgtagtagccttgggataggtggacgatttccatggtggctcagaactccataggtgagctccccagataacaaggtgaaaagtgcatcaccgttgtggcccaaacttgggtatcacactgcattattcctaccatgtactattggttgtaagcaggtaaaaactccccactttctaggagaggggaatttgactctatcccttgatgaggaggaggggcagttgccagattctagaggagcatgcagagcaagaaatattggggggggaagaaaatcccagcactttgaaaggctgaggtgggtggattgcctgaggtcaggagttcaagaccagcctggccgacatggtgaaaccccttctctactacaaatacaaaaattagccaggcgtgatggtgggtgcctgtaaccctaggtactctggaggctgaggcaggagaatcacttgaacccaggaggcacaggttgcagtgagctgagatcgtgccagtatactccagcctgtgggacagagtgagactccatctccaaaaaaaaaaaaagaaaaagaaaatctttggataataatacagtctgccacaagtaccatggaaaaagaaagaatagagcaaggaagggagatttgttccagggacatgaagtagaggaggttccaatagtaaaaaggataaaaggatagtccttaattagatgacgaaacttggaatatagacatggtggaagatatctggaggaagagagttccagatccagagagtaatatatctggcatgtacaagcagttgcaaagaggccagggtggcagaggaagagtgagcaagggataagagtaataggagattcgactggagaaataaagagggacctgaccatgctatgcattacaagccgttataaggactttggcttttactctgactaaaatggaaagccacctcagagctttgagaagacaagtgctaatgatctgaccttacttccttctagctactgtgttgagaatggaacttaggaaggcaagggtgaaagcaagttaagaggacattgcagtaacccaggtgacagacaacgatgactcagggcatggcagaggaggtggtgagatgtggttggattctgaatatatttaaaagatggagccaacagcatttcctaacacatggtgtatgttacaaaaggaattaagggtaactccaaggctgttgtttgtgccactggtaggatggagctgcctctaatggaaatggggatgctcaagtaaagcagagctggaacaatcagtagtttcatgttaaattgagtttgcaatgtccattagacatattagtgtctccatgtggtggcaagaaggtagttggatctatgaagttggaatttgataaagaagcctgggctggagagaaagctttgggagttattggcctatagatgattaaagccacaagactgggtgaggtcaccaagcaagtgagtatagacagagacaaggacctaggaccaggcctttcagaatttcaactttaagatatgggagcattttccagggtacagacactgtactaggctctgggaactaaatagagcccttgcctgctagggaatgtagagcctattctgagagccaaaaaatgccaccatagaggtatatccagagctatgagaatccttgggggtgggatgcattaacccagcctaaaggtaaatagccagtggctttctggaagacatgaagcctcaaccgaagcttgagaagtaggaagaaccaaattaaagaagggaagggcgttccaggcagagcggctagcataagctatggcacaggggtgggcacagcaggttgagtgaggggaaccagaaacggtttgggaggaagcatggagggagatggggctgaaactgtcaacaggggccaggatgaagcaaaagatgagtgtttgttacactaatgactttggattgtaatcaagaagccactggagccatcgaagagagcaggactttctaaagtagatttgcattttagatcttgtagagatcagagcagggacaacagaggcaggtaggcggctgggacagtaattcaaggaaaatatggggctgcccaaaccaggagactgggcccagagcccagacaagcctacgcactttttctgcatgtagagccataaaatcagcttgttctcgttggcatgaaaacttgagtctctcaatatatattttaagttcaattatttgaaataatgtatgaactatcttgaattgaagagtcaaaatgcctggaatcaagtcctataacattcattaagtattcaggtgaccttaggcaggtcactctcctctgggcctccatttccacatttatgcagtgggagcaaaggggtttgtcaaagtgatccaaataacccttctgtcactgatattctgggagtctaaataagaaccaattggccgagccagctgggcctccctcccactgatggtcgcatgggacctcactatctggggctgccgcttccatggttatgtctcaagttctaaaaaccacaattggccaagggccttgggctcctaggagctcaaggaggcccaagacaaattaacttcacctgccagatagatctgagcctcagtcagaggccttcaatttgggttgcgcattagagttacctggggaagttttaaaaaacaccaatgctcaggccacatttcagatcagtttcactgggggtgggatgtatacttcagtgtacagccacatttcagaatcactgggggtgggatatatacttcagtgttttctaagccctccggttgatgtgaatatacttttaaagctgagaaccactaagaaaacccatggagtccccagcatgtgcccacacacatcccctggcatgctctgccaaccctcaggtctactcctgctgatgaaagggcatgtgattctgaaccatatacccttcctattaaagtcaagagcatgtgattctgaaccacagcatcctccctcctccccagcctgcttcccccccagctccagttctcccaccttcccctgttacacagcaaaaccctaagcatcacagcaaaatataagagatgtgggctggagagccgagttatctgtgtcccatgtaactgctgccatggtagtcagaagagcagcaggtttagggaagaaaagggagaattggaagaggtgactttgtgatgggagagaaggaagaagcacattcatcccagttcaatccagacaggctgtcgccataatgaatggaaccagcccagtagggcaaccagaaggtactggttattacagctccattaagactatttaaagcaacaaggaacagctgtgaggaatatgatgcagcctaatgaagagcaaacatttgttcattttccagctcaggacggacacaccatatgtatggcttttgtggggaaggcctgtgttgccatcttgttcttagtcatctgtgggtgatggggtgatggcaggcaggcagcttttgaatggggtataactatagagatggaagtttcaggtcaccccaggtgctcccttctctgctcagagccccctgagcagtgtctgaggacacctctgcttctcccacaaggtttgttctcctcagttggtaacagagtgatgacagaatatcccaccacaggcaaccccagaaaggttctggttcagctcctcaatttgcagatgagcatggttctagggaggggcatgaggaattactggcccacgcccaaatcatgaatgggaaatccatggggttcttcaactctgggaactcataatgaccaaaacaggaatacctgggctccacctgctcgtttcactccactccaccccacctccagattgaaaaaagacaataggccattatagggagtggccaaaagccatcagtgaccgctgtggtttcaaacttgagagttttccagcaggaaagagctcacatggaagagactatggttatgatcatggaagagttaccaaggatcttggagggatctaggatcttggaagagttaccaaggttatgatcatggcccctggcagtctgcctcttcactgtagctggctgcaagtgtagagaagagttgctggcctagagtcagccacccagaagctcatgcatgaccatggagacacgtgtaggcagctggaagtctgtagcctgaagtgagttatggggatccccaaaattgtaggctcacagctgggaggaatagaggtaccctcgtgtgagattccccattaagggaaaagggaagagactcagtctttcccttttagcctatttttattgttctacttacaatattgtttctaacagagcacatggtgggttttttgtgtatttaatacaggatctcccccaaccaagtgagcaattttcaggtggtactatagaaaaatcctttgaccaagagtcaaaacctggtcctcaatctgctcctgagactctgggtggtcttgggcaagactcttccctctctgggtctcattttcatctgtgaaatgtttgactacaggcttagcatgaaattctaaaggctgatagtatatgcttctattttatgaacactaatctggccagaaacactgactgagtatttattgtgcacctaacactgggcactggagatagaaagataaataaagaaaataaagatgctgctttaaagaaagctcgtggtcttgccacaccatgtaatgatgtaacagaactctagttcaaatgctttggagacacacttgctttttgccacttcttgttgccaaaagctatcagaagtttcagaaaagataagactccgagttagagaaaagtagaagaagatgggtagaggagaaggttgtgtacaagagggaactacatgtgcaaagcttggaagcaaaaaacgaaatgattaaaatgctgcagccaatttttttttaggagaaacaaagatgcctgcctatgaaaggagaaatgaaactagttggggagatttaataggaatcttacacccgttgcacagttttcttgaaaacagttaccaaggttatgatcatggcccctggcagtctgcctcttcaccatagctggctgcaagtttagaggagagttgctggtctggagtcagccacccggaagctcatgcatgaccatggagacgggtgtagacagctggaagtctgtagcctgaagtgaattatggggatccccaagattgtagactcacagctgggaggaatagaggtaccctcgcgtgagatttcccattaagctatagacttcttgaaggcagggaatttgtcacctaaaggagaacttgtagcttttaattgggccttttaaagagtgttttgtgagtctacatgcagacatgcactcaacttctctgccttgatcaaagttcctgtcacagacaaatacccccatcttgctgcaatctgattttctacttagcttcaccagcagaactcataaattactgtctatttagtgacatggtatgcaataatatttgctctcctgatgccactctgaatagacgtcattagtcatcctctcctgccttctctgtccacatttataatccctaagtcttgtgcttttcagcacagaagatggaatttgttgaaagcttggcctctgccaaggccaccactaactcctacagcaccttagagtgaaataacaaaaggtgcacctgtctcaagatatttggctgtcaccttccagaaaatgttcataataaatatggaaaccctaaaatttctgccgtatgcatggtgctcccatagatgcaatgctcttcgattgtgcacaacctgcagagctgtgattcccttgtcacccacaagctgaccatcgacatcagtaaatgtgttaactgaacccgtggaccacaatagagaccagaccttaggctcccaacagattatgaaacgttcccattccctaaatgctattttacctatacctagagggaccagcttatcccaattttcccaaaacggtcccagttttaaaactgaaagtcctacatcctgggaatccctttggtctgaggcaaaccagaatagatgtttcagagatttcccatctttgcccttgtaagaaaaaagaaactggatgtttctaccattgtgaaagacagtgtggcgattcctcaaggatctagaacgagaaataccatttgacccagcaatcccattactgggtatatacccaaagcattataaataattctactataaagacatatgcacacatatgtttactgcagcactatttataatagcaaagacttggaaccaacccaaatgcccatcaatgatagactggataaagaaaatgtggcacatatataccatggaatactatgcagccatagaaaagaatgagttcatgtcctttgcagggacatggatgaagctggaaaccatcattctcagcaaactaacacaagaacagaaaagcaaacaccacatgttctcataagtgggagttgaacaatgaggacacatggacacgggaatatgacaccccagggcctgtcagggggtgggggtggggacaaagggagggagaacattagagcaaatacctaatgtatgcggggcttgaaacctagatgataggttgataggtgcagcaaaccaccatggcacatgtatagctatgtaacaaacctgcacgttctgcacatgtatcccagaacttacttaaagtaaaattaaaaaaaaaaaaaaaatccttgatgtttttgactgaagatggcaagagaatgatttctacaagtggaccaaaaaggctcaatattatatccctgggaaagaggatatggaagatggaagattctgggcacctactgtgtaccaggcattgtgccaggtgctatgggtattgtatcgggtagtcactaatcatcacaaaattccgtggggtgtgttattttccattttttaaaatttacatagtataaaattagttttgggagagtgtacagttttatgagttttaataaatagagtcgtttaaacaccaacacaatcaggacacatgagaatttcatcaaccaaaaagttaccttgcgttacttctgtatagttaaatccttccccacccataaccttcaggatgtattactgactcttttcagaaacgtttattgacactcgaagtggtgaacttatttgcagtaaaaatattcaaacattttagtctgtctgccttttgcaaagctctgccttttccctgactcgcatacacagttagtgtgcaagtgtatttcttgacaagacaaatgaaggaaagacccaggtaaaatggtgcctccttgctgaagactctccagagtgttccctgcaccaggagagtacagtgttggacaggggtgtggagaaatcctggcaggctggactgaacatggaggcggcaagccctcagctgtgccctggagcatcagccaggaactgcctcatcagcgatccctggcctggttttgctgcaccctagggcataacatatccaattatctccagggatacagtcaagcaaaggagagtgaaggggggcattgcaaatgacagaatctgctgaggataggaggtaaatgggtaaatgaaatgggctgacacgccctcagccttgaattgggagtgagctgctctaggaagctttgtgttttgacatcttactattttaggcataactcagaagggcttaggtgcaaagaagagtgtctaaagaaggatggcaagcttctgttggtttggctcagtagaaccaggtagaagaaaaaatcagccacacaggcatcagcgatcattctcagttctagcagaaaatgaacgtactaagtgggacattgaggtaggtttcatagtcctatggactgagtcagcacagcagaacacaagaagtctgtgacttgtggtcatgtggtctgagcctcccatgggctcagctctgtggataggagggtgggttgcactcgcagggagagttagtctggggcgggtaccagatgataattttattctaaaatctataaagcatatcatcaaggataaagaaggttccagtgacaagcactgtctgccatttatcatgatgctggcactagctcagcctacccctcttaaaaagtttctgggtcaggcgcggtggctcacgcctgtaatcccagcactttgggaggccaaggcaggcagattacctgaggtcaggagttcgagaccagcttgaccaacatggagaaaccccgtctctattaaaaatacaaaaattagccgggtgtggtggcacaggactgtaatcccagctactcaggaggctgaggcgggagaatcacttgaacccaggaggcagacgttgcggtgagctgagatcatgccattgcactccagcctgggcaacaagagggaaattccatcatctcaaaaaaaaaaaaaatccaaaactttcccattgaattataataaaactcacgttcttgtccttggtccacgagaccttgattgaacaccctgccccaaccccaagccaaatccacattatttgtcatcctcctcttattctctctgctctggagagcctccctttctagaggctctagaacacaaaaagctcattccatcccagggcctccgcacttgctgttccctctgaatggaacattccttccccagctctcgccaaagctggcatctgcttatcatttagtttttagctgaaatgtattggccagagatcagcagggacacacctcctggaggtgaacaagttgggtttatcacttgttgcaatgaagtgaatgcatacctggaagtgtgcattcctgtgggacatttcaggaagaggatgttaggaaggactcagaatgtgggctgtgtttgctgatttgaaagaggccctaaggaggtgaggctttgttttaggttggacacactgggaagtggtatgattggatatcttaatacatcttacctataagaagggaagatcagatagaggctagagctgtaattggcaaagaatcaggccgctcatattaaccagaatatgggggtgtttggtcatttttttggcttggacaatgttcatatctttgtctgcatccagatacaacttgcttttgtcttgttccatcgtggcctcagagcggccttgcctgtggttggtcttccgtgcaattgtccacgttcagcaggagagcaccaaggcctacctgtgagtgccaggtcagctcccagaattcaggggctgcttttctccctctcagatctccccttttcagagttctccccacaccaccctatctagtcccttgcccgggtccctgtctatcccagcacctggcatccagatggtcactggggaaggaaggaagtgagtgagggagggagtggggacagactcaatgtatattcttgggcaagtcatttcctgtctcaggacctcactttgctgatctataaaatgagtcaataattttctcaaaagatccttccaaatctgacttttgaggattctataaataccacggcgcagctctccagggataaggacatccccaaatacatcttttgaactaaaaaaaaaaaaaaaaaaaaaatgactgccttggaaaaacaacactgttgaagagtaggaaacatttccacactcagagaggaatgtaaaaatagggcccagcactctcaggagaagagaatgagaaaaggaaagcggagattgataatggatgaatataatgagatggcaattttggtttcaaaagaatgtgattagcgcctaatgactgccaccattccctggtcaatctactgtaactagccactaatggaaaaataatgcccttagcttgctcactttgaagatggaaatgagtctctctttcatacttttccccctcatattttttttgcttcaagagattatcccttattagattgtagctccctaaaaagggaaatggatgtgtgatcaaagtctgccaattacggggtcattaccactccctcccagaggctctattaggcatccctcctctgcttttatcaacatcatcacagcccccaggcctactcggtccccttcagcccccactaagggagacagaggctcccaggaccatgacagggcctgtgtggtttcccacgaactgccacccacttatcacaactgttttgttcggtttaggattgttgagggataggtgcatgctggggtgtctcctggaaggcatggtgtttgttgatggtgagaggaccccaaactgccattcaaggattctgggagtgaatacaagagactttcatgaaatctctgcaggatgtcacaggacagagaaagggcacacatttattctgtggggccccatgagatggcataggcaaagtgcagtgaggttgagtaaagaaaaaactctggtgagtctgtccaaaagtgaggccaaaagttggagaagtggtgagctatctgtcatggaggttatccaagtgatagatgctatggatccacttatcagctgcttggaaggccattgtggatgggaacacaactaggcaattttcaaggtcactgacacctctaagatcccaggatatttgccctctgaaagcacagaagccacctcattcactaattattccactcattcattcatcctaaataggtctttcaagcacatctgaagtatagagccagcatcgggttctggagatacagtcgtgacaaagatgctaccctttccttgaagaagcctatgaccaagttgagaaatagagttaaattattagatgcaaagaagtctatctaataatagaagtaactggctttacctggggatgcagtggggtgagggagagtgaacagagaagattccacaaagaagatgcttacgctgagttttgaaggacatgtaggagtttgtcagacggactcaggtggaagggaatttcaggtaaagggaacagcatgcgaaaagtcttataaattttaaacaccttataactggtaggatagatataagagcaagaagtgatgctgcaggggcatttggggtgaagtcattaaggatgttgcactaaagagtttgaaatttatcctgaaggcaatggcaagaggaatcactgggtcctattcacattttagaaagatctttctgattacagtggagaatggattggaggggacaaacccaaaacaaaaggaaccaatgaggagactcatgggaaaatattttaaagtcactatttgcaaaaattatggctgcatagtagcatcagctggggagttttaaacactaccaatgcctatgtcccaccccagagagtctgacttcattggtcttgagaaggaccttggctttgggagttgtaaaacctgcccaggtgattctaatgtgcagtcataaagagaccttaagctaatggtaacccaaaccctggcacatggcaagtactcaacgcaattattttttcaaaaaattagtatgaaaacagtcatgctatcctgcttttggcttcaccccactttcagggggacatgtttggttgaacaattggcttttatcacagagggtttcaggtacaaaatccaccctcaatagatcagctttgacatccagaagtccagtgctaccactgagagcagcaacctcccttcacatacagagaacagacctggcaagttgcctggaggagatggagttacctggctgggatagaagaggaggctagggctggaatctgagttctaagagttacctgcagtagctagaagcatcttccacctagagatggcctaaactggtggcaatatggatgcaaggtttggtagaatgaggagcaagaagagaaatacgaaaaggagaagaaggagaaagaacaagaggagaaaagtgagagataagccccacatttgtgaaatgagcacttacctatccttataacatttttgccatacccagatttaggtcagagattggtgcccaaaacctagcacctgtattgcttctcttccaggatgtttgtctaagggcgttggacacagaaagaacaaaattatgacccattaatagctaggaaggcactttattacccgaatctaaaacctaagaaaggctaagttgtagaacatggctcagcctgagaagcccaggaaaggaactccttcctgtgccctctaatgaatcttcagttgctaggtagcagaatgagcactaattccacctactcagccactgcatagatgaggatcatagtcatgcttctagaataaaggtcagcaagctatagccataggctaaatccagcccaacatccatctatctatctatctatctatctatctatctatctatctatctatctatctatctatgagacaaagtctcactgtcacccaggcaggagtgcagtggcgtgatctcggctcactgcaacctccacctcctgggttcaagcaattcttctgcctcagcttcctgagtagctgagagtacaggcatgtgtcaccacgcccagctaatttttgtatctttagtacagatggggtttcaccatattgaccaggctggtcttgaactcctgacctcttgatccactcacgtcagcatcccaaagtgctgggattacaggcgtgagccactgcgtctggccccaacacctatttttgtaaatagagatgtatttgaacatagccatgaccatttgtttgatttttatatgtgactgtttccactctacaacagtagagttgagtatgagttgttgcaacagagactacacaactaacaaagcccaaacttctttctagtttgcccattacagaaaaagcattccaactccaactctaggaaaagactcacccaggttgacttaacacttgagagaccagatgcaagaaaggtagaaccatgcatgagcactggcctgttaagaacctgccaataaaacagggcttattgaggggctgaatttctgatcaacctggttcaggttcctccttgcttaggatagacctagtaaggaatagatgggcaaaggcaaggctggtgtattaaaatgaatggtgggttctcctcctgcactgctgacagagagctgtgtagactgaaggtgttacaaattcagtctcagaagcaatgaaagggcatgagcaggatgttcagcctattctactaaatttagggtagagagagtaatcaaaacatggtctgataatcatgcttctgcagcttttctatagctgttcccactcccttaactgcccgtcctccctgtctgtgaaataactgactgcacccttccctgtgtttccataccacttgactcataactcttgtaaattgtctcatgtttgttgacttgtctgtcttatcggtggttgccatcctcttaaactgattgatgacttctatctcttccctatccctaagctctgggtgtccatgtccaacttcctattcaacatcagcttggatgtctaatggacatctccaacgtggctgccatttttgttattttgaacatgtttttaaaaaagtgtgcagtattcaatgctaggcactctactaagcactttatgtacccaaaacacaacacttaattcttacctccccaatcctgtttctaacccaggcttctccatctcaataaatcacatctctcccccctcagttcttcaaactaatgatctaagggtcagccttctttcctctccttccttcacagtcaggatctatggcagatggtgccctgcacacatccactctacactcactgttcccacgcatgcccaccttatggcttcctcctgtaagcacctgtgactttttgcctgagggcttcttcaagacagaagaatatgcacactctgcccacagagcatggaagaaatgctggggagtttccaagagttgtcctcaaccaatactggatgcgaattgatcagtaactaccccaactttgtgccaaccccatggtgggataactctaaggcatgagatgtgcccattggattaggccccagttgcccacagtggtaacctgctcattgatgtgctctatattgacttcattcccttgattgtgccacttccacattctcccacccaaactccctgggagtgcctcccaaacaaactacttgtgcctgacttgttatctctgagtctgcttccgaggcaacccaagtcaacaacattcaactgaacatcctgcaaataatcacttctcatatgtccaccaccacggtctaagagtccaaggtaccatcatgtgttgcctggagtactgccacaacttttttttttttttttttgaaacagagtctcgctctgtcgcccaggctggagtgcagtagcgtgctctcagctcattgccagctccgcttcccgggttcacgccattctcctgcctcagcctcccaagtagctaggactacaggcacctgccaccatgcccggctaatttttctgtacttttagtagaggctgggtttcaccgtgttaagccaggatggtcttgatctcctgacctcgtgatccactcacctaggcctcccaaagtgctgggattacaggcttgagccatcgcgcctggccactgccacaactttctagcagatctccctgcttcctccatgcccctcccagagcctgtgttccatacatgagccagattgtactttgtaatacatgaatcagatgattcccctgcccaaaaccctctgatggtttttcatcacacttagaataatgcccagttcattaaccagtaatagcaatgtcttatataatctggactcccccatccgctctagatacttccatcactacttccctcttcacaacactccagtccttgaatatggtcatttggttgctgcctgaccatctttgcatctgctgttccctctgcctgaaaagcactttctacttttcttggtgtgactggctgtttcatattaaggaattacagtatcatgaaggaattatagtatctatcattaatgaagtcccccttatctgcagttttgtttttcatggtttcagttacccaaggtcaatctcagtcaaaaaatattaagatatttagagagagagagaaagactgcatttatataacttgtagtatattgttgtcatactattttattattgttcttaatctcttgctatgcctaatttataaattgaactttatcataggtatgtatgtataagaaaaaacatagtatgtatagggttcggtaatatccatggtttcaggagcccccccactggggggtctttgaacaaatcctccaaggataagggaggactactgtaactaaaatgttaccttcttggagaagccctcccagagtgtataatctgaaataattctcattcctcatcactatccctttattctgctttattttcatcatagcatttttcatatctaaaattacacatttactcttttattacacatttactatatttcctagttgactggaagctcaaggggaacttgtctgtttctctatatccctagtacctaaaacagtgcccagcccatgttaggggctcagtaagtatctgttgagtgtatgaatgaataattcaatgaatggacaagcgattcccccactgggctagattgtgaactcatgacacagaagacatcaataacatttgaaacaatgaacaagagaataggtccagggacagacaaaatctatgtcctccccaggccccatccaaggacatctatccctttccactaggagtcccatcgcagtgggtcttactttgccctgttggttcatctccacttccataaagctcctatctcaggccactctaaccactctgtccttgctttttaggccttaccagaggggcagacagcttcgtgggacacagccaaggaggatgaaaaccgcaataagaatcgatatgggaacatcatatcctgtaggtgcccttctgggagctcctaagcttcaggtgttgaggatgcaggggaaaagaggctattactattatttacctggaatttgttatcaaataatctttgctgtctctagctttgtatctacatgccaagatggaagctttatatcagccttactgccatccctagactggatgacagagcatggctgatctcagccagagggagcaggcagggagatgggtcagggcagagcagaaccatgaagcctcttggggaagaacctctgaaggctgggtctcaccgagcattgcctgctcaattcctcaggtcggggaagaagcccagccaaaagggctgacatgcggaagaccccacagctggataaagagatgagctctgtgttcccagaagctcctctaattcaaaggaggactttggcagcaacctggggtgaggagcatgggccccagcctgtgagggaggggctaggagaacccgggcaagagaatgatgctcctccaagaaggtggagtcacactggctgatgcttggaagtaaaggctgatgctcagaagaagccagtaactctggcatacacctggggcttggggtatgcccagctcaggcctcacaggagcccggggctactcctatagtatgagagacagagtttagggcaacacagattctacctgtccccactatagtagggcaggggctctgaggtgagggcctgccctcaggtctgcatcagtgcacctcgggaggtactgagcctgcaggggaaggcatgttacgcagagctaaggaaggacattgcctttgctcaacaatgagctttacctttcctgtaggcacccccagtgaatgactcattgatgaagtcagcggtgcagagtagttagcgccctcgggagtcaaactgcccaggtttctatcccaactgtagggccctgggaaagttacttgacctctgtaaacttttgattcctcccctttacaatgatgaggataataggaggagcatttaaaggtacataaaactcttgctacagtgcctggcaccattactcttagccacaggggtacttgcttgaggtcactggtgagcagcatggatctatcattccaccttattttattaaccaggattcactgggtactcaggacatgtcctgtggggacatagaataaggcaggttggttggggagaggtgggcatgatcagatgtccattttggaaagatcactagggcagcagatatggaaggtatacttgattgggaagggctggtagcagagggatcagtcagcagactactgcagtagtctcaccaagggatgatggggcctgaacaaacagtgacaataacttgtgtgtgacaggtgcatggtattcagttctggggggtgaggaagagagagactgccacagaactgaatgtcatgcataggtaacacacaagtattgtcactgccaaatattcgtaggtacagccttcaaagtaaaataaatacagagaagacaaagttatctcgtgcaaaatgctaagcatgtattctaattagaacaggagtctacaacagcctttgtctgactcagtgtaaccaacctggaccttttgacatctcaccaatggtgtggggaacatccctgggtctcagctcacagagtaacccagttcatccaaaagaaaaaaaaaaaggatcctgaatgacaaattatttctagcacaattcagagttttgttttgttttgttttgttttaactgtctagacattgcctaagaaaaaacttggaggaagaaagagtaagatacaggcagattgtaaaggaagaaaaaggcagaagttttagcttagctgtttcctgtgctgatttaggaatgggctatgaatggtagaactaatcagaaaacatttataatttctctcttggaagatggtaattcagacagcaagatttcttgcaagtgaagtgttgagaagtgatattcaaacagtcagcaaacatgtattaagacttatgacatgtgggcctcctcaaagcaggccctgtgatgggcactgggaggtggagctcctgctcctggggagcccccactctgccacagggagctgcttgccctgtctggtccccagcattctctgctcctgcactgtggacactgtaccctaaaatatatagtcacttatctgataaagcctatgcctgaggctctgagcttgcttcaccctagccctgccctgcctgcatctcttagactgaggactttctccaaagctgggaaaggatcccctgcccaggcacaggcagcctgcaaatcctgaagggttaatacccccaggagaagccctccaccatgaaataccccagcttcttcaccgttctcctgaagttccttctggagttcccacagggatgagaatacagctacctgcagtcctaatgggcttgaaaactcacccttaataagctgccttctcttccctgtcgtacatcacccctttcctactggtattcctgtctcctcctacataaactgcttggactaaaatctctgtcttagatctacttctgaggaacccaaatggagacagagagaactgaagcaccttgacgataccaccttgatgggtttaaataaaccagaatctcctttctaatttaagagtcaatcattctgcaagagatcagggcaagagcaggtctgcattcagtgctgaaagaagacagtgccgaggtaaccagtgaattcagaaagcagcgcaagacataaaggagaatcaagaaaaaaagggaaatggaaaaaaaacaacctggaattgaaatgggatatgtaaaaaagaaacagccccaaggaatggaaagtgttcctgcccttgtatgcgtccctcccaaaggcaaagcctgccgaggcttgataaatagaaatattcttggcgcaagaagaaaactggctgtgattagcatcttaaggaacccagagcactgtgaggctggagtggaggacaaaggcccaggccagggagaacagaaaagattaaaggggacaagtaggagggagggcactgcctacaaaagaaacaacaagagaccttggcgaaatatctcctttcttccaagtgattctatttagaatttagtaatagagacagtggggtttctagggagtgtaaatggaaaggaagtgaaagggaaggaaatgaatgggtaaaataagaacaaagagacctttgcttccaagtaactctagggcagcgactgttggcaaggggaaattcaagaatcccaaagcattctccatgtaaagttttagaggtgcttcctagactggcaggaaggtgctgacactgagaagctgaagtgatcacaggggttgcaaatgttacaaaatgaggcccccttctgggatcagttctttataaaggtgtaatctagatgtagaaagactacaagggatagtgcagtaccaaaattccatcctcagaccaggaaggattccgtaggaggggttaccaggacccaaagagagatgacctgaccagaggtgggtgcgacctttggtggcaaggcagccacccatggtgaccccaccaaggggtgctggaggagtaagtacctccatcacactctcctccctccacccaatcttctgcctgtgctttccattggctggggccaaccagaatccagagaacaggagatctgttgacctaatccagtggttctcaaagtataatgcctacagcagtggcattagtgttacctgggaactcattagaggtgctaattcttgggctccaccccagacttactgaatcagaaattctgaggacagagtctagcaatctgtatttctagaagccctctaggtgatggtgacgcatgtgcaactttgagaatgtccaatcttggccatagcaatcagcctcctggattagagggccagatgaagtggagagggggtctgcgggcacacaggatatcagcacattttctgagacttatcttctcccaatctaggaaaagccactgggctcaggtgtattggggtcttagacatgaggtcaggcagtcccaggttttcatcccagttctgttgtttaccttcagcacaatcacttcacctcacccaccttcaggttctcacccatcagatggctctagggcagctctcaggatggagaggccaaattaagctgaatgattattaaatctgaatcttgtgtggccccttaagtcacagacttttaagtctagatgagttagtgtagcctttttgagttcacaggcaagaagagagagcccagagatggactgtgccctgcccgagagcacacagcaagtctgtagaacagccatgaccagagctgtggtctcttgcctgccagggtagggtggcacatattccttaccaaagagtcctctctgcatcaagtcacatccatgttcctgggggagaatgtgttgctaaggcccaacctcagagcagatgagctcttcagagaggcccatcttttccagaaggaggtggggctatggagtgcagagaggaccctcactcctagtgaggaactcaggttcaaaacaaaacccagaggacttttttcacagcaggtttctctgctgattcctggggagacagagctgggggtgacagagtgggtgccttattcaatgctcctgactctcagcctccattcttcttcactgtctctgagggtggccattgcctgggtcctacagatgccttgtggtgcagaaaccattggtaccctgccatatccccaaacactcactacttgcatgtgtgctagtgctaattcaaattgccagcacctttgcttcttttcctaaggactttttctggccactagagccttctctgccttcttgcagggcaggcccaaagagccagaatattaaatgtccccagaacctgccctcaattaatgactgatggaagtgggtatatacataccccagctccctctctgcttaggtagaatgactcccagagctcctcagccgaattaagcctcaacttgctacaatggcaacttgctgaatgacacacccctattagatttcttctttctctgtctcacttcccactcccctgctggtgtttcctgggatcaccccccgacaacaactacttgcatccaaatacatatctcatgttcttcttttgaagaaatccaaataagaaacctccctcccttccttcagaaaggcccctcagtggggcagtgcctggatggcatccttaggacacaggtggtcctctcttggtgcttgcccctctcaactccagtccccttcagtcccctcaaaggttgcatctactggagcagctcctcccaggaccccacaaaggggcgttttccaatttcagccagcatggatctggcaggacaaggaggtacacagaatgtcgggctgtctctgcatcatgcccaagccagcctctcttgataatggtaattcaatcaagattgaatgtgcagacctttagcttcagtgaggtacccaggcagtctcagcagaattacctgcctcctccttatccacttttgcaagatgatggcattaacatttccaatacttgtaggaaatggtttttcagctccacaattcattgtaatgagtcaaatctcttttctctgaaaaaaaaaaaaaaaaaaaaaaaaagcactgttctttaccctctgtagtgcccagaagacaggaagaaagaatatcaagtatccaaataatattctctccccagccccacctctttgaagtgattctctctttaagtggatgtgggttgagatgacaggtttactgggctatctttggtgatggagggagggagaaggagttgtggtttgttctgagagttagaactgtatgaaagaggaaagtgaaccctctctctcgggtggccatgagaccttagtgggatgaggaccaatgttggagactgagaacttagaggaaagtggaagctggagaagtgtggcatagaagggtatggaggtcatggatctcagcgttccaggaggagtgaggaccctacaactctataaagaagccctcatccctataccttctcctgagttattaaactttttggagccttgaatttctcattcatgaaatgggatgatggtatagacctcacagggttactgtgagaatcaaatggcatggcatccccatggcatttgataagtgcctggaacatcttacacttttcacacagctaaatttccgtatcccaccacctggcacaaggtgagtctctagtcttatggcccatttccagtaagatcttctggtctttcccaagacagattgaagtgaataaccagagcacctctgcactaagtcactaaacattggtctgtatactcaaacctgaacgtgtatcagaatcacctggagggcatattgaaatgcatattgatgggccccaccccacagtttctgattcagtgagtctgggctggggcccaagaatttccatttcaaacaagttcccaggtgctgctgatgccattggcccaggtctagaataaaaacaaaactgaatttatatagttgtgttaatttcttacaacataccaggtgggttcatattttacatcttttaatccttgcagcaagtctgcacagctatatatgatttggatgttatagctgggtaaacagaggctcaggggaggtggtaacctgccccaggtgatatggttagggtgtgacaagcctcaggtctgccttcagactccacccaatccataacctcccttctgctaaaggcaagaattggctgccagtctttggaagggataggctgggtctacaggtgtggtgaggggtcagctatgaggagaggaagaattggagcccaggatccaggcgcaactgccagcttggatggaggtgttctttgaacatgcaaaggccctgtggtcagagtgaacacagtgcatttgagcaactgaaagaagaccacagttatcagagcagtatgtgaagctggagagagaagtaggtcccaaaccatcagatcatgcaagacattgcagggtgtgctaggctttgtcctctgtcagtggtgttctgtagctgactcataccagcttgcaaaagcagattgttaaattttcaggaattttgtgaggtggttgatgctatgttggtagcttgaaatcggtcatggtgggagtatttacaccacagaaatcagcagacattactgatcagggccttttttcccacagggagctgtatgttaaacatttaccagcatactagtggtctttgacctcaagcaaggaacagcagattgattgcaaactgagtgatgatgttcccctagacttgtgttaaagggagctctttgaatttatgtgtcttggtaccatgtctcccttctaccttctgccaccagttccctcctcgccacagccagctcttgcccatctctcacctcaactgagagccgggggagccaggctgcaccttcccctcgcctcattgaggagtttgcttctcctccacatgactcttcttaactcctctccttgtcttgaatatcaaacaaggagtaccaaattagctgtttttcaagcttgcaaaatgtagatagagcataatgaacattctaggctgcttgtaaattacctcgtataaacgccttcacatcgcctgccgccccatctttctccatgtgcatgtgggtaaacacaattttttatccttctaattatataaagttagaagaagaaggggacacagaataatattagcatctcccaaaaggaataaataaaccatgaggacactgccactccttgcagtgcctttgtggtggacctacagctgaattccaccctttagtgaacacacacaatagttctttgcctctgcagatagatggatctgtatttggtacagaggtcaagtggagagcaccaagtttctaagtatctctgctattagctcactgcctgcctcacattcagccccaaaaccatcatttattaagcacctgctgtgtaccaggcattgtcctagcatttttctttagagcagttttaggtttacagaaaagttgagcagaaagtacctcattcccatgtactccctcccacccacatactgtttcccctattattaacatcttgcattagtgtggtacattcattacaattagctaatattgatttattattattagctaaagtccatagtttattcaggtttgctttttatgttgtacagttctataggatttgacaaatgtacaatgacatatatctactattgcactattgtatagaatagtttcacggccttaaacatcctctatgcttcacctattcatccttccctcctcccaagcccctggaaactactgatctttctcctgtgtctagagttttatctttttccagaatgtcatatagtcagaattgtacagtatgtagccttttcagattggcttctttcacttagaaatatgcatttaagtttcctccatgtctgttgcagcttgataactcatttctgcttctcactgaaccataggccattgtatggatatcgaatgaatgctccttcacttacagtgaggttatatccccataaacccataagtttaaaatatcataagtcaaaaatgcatttaatatacctaacctgacaaacatcatagcttagcctagcctacgttaaacatgctcagaacacttatattagatgattagttgggcaaaatcatctaatacaaagtacattttataataaagtgtagaatatgtcagggaattgattgaacactgtaccaaaaattaaaaacagaacgtttatatgtgtactcaaattaaggtttctactgaatgcatgttgctttggaactatcataaagtcaaaaaaacctaagtctaatcatcccaagtgagggaccgtctgcaccacaatttgtttatccattcacctattgaaggacatattggttgcctccaagtttttgcagttttaagtaaagctgctataaacatccatgtgcaggttttcctatggacataagttttcacctcatttgggtaaataccaagaagtacaattgctagatatagtatggtaagtgtatgtttagtcttgtaagaaactgtcaaactgtcttccaaagtggctgtaccattttgcattcccaccagcaatgaatgacaggtcttgctgtgccacatcctccccagcctgtggtggtgtcagtgttttggattttggccatcctaatatgtatgtagtggtatcttgttttaatttgcaatttcttaataacacatgatgttaaacatcttttcatgtgcttatttgccatctgtatatcttccttgattaggtgtctgttcagatctttctcccattttttaatcaggtcatttgctttcttactgagttttaagagtttgttgtgtatttttgatacaagtcctttctgagatacgtgtttggcaaatatttcctcccagtctgtggcttatcctctcatttcttaatgtcctagcacttttcacacctatgttttctcatttaatcctctcatgccatatagtattggctccattttgctaaggaaaccaaagctaagagagatcaattgacttgctaggtgatggagctaagatttgaagccaaatctgatcacagctccatatctcacgtcttatattaaaagtttatctcacttgacataagttagctgtgtaggcatgaattttggttacatcataataaagcacctttccactgtcccagaaaagaaacactgtattaggctgccctgcagagcccagcatgattccttgagtcttcatggcttcacagggcatggagagccttctgaaatgaaacccccgctgctgcctcctctgtctcccctcccatcgctgttcccctcacactctgttttcccaggacaggagacccttgcagctcccccacggtgcttgcttttttcaggatatctgccttcactctagccattccctctgatggaaagacttcctcattgtgcactggccaaaccttactcatttttaattcctcattcacatgtcactacacaaagccctctattccccatcttctagatttggaagttttgcttctgcatacagtctgtctccactaaattgacaaactccttaaacatgagtatcacatttgatagcactttcttaatcccttcaactagcctggcacatagtaggtgtgcagtaaacacattcttaataaatgaaggagagacgttgtcaaacaccatcatctggtggctagagatcactttcatccataagtacacttaactagaataaataagttcgtttctttttgttttgtttttaatcatttttgctttccggtttttcaacttcattttatattttaaaaattccctttcaacattttaaaccacaatctctgtttccagtgctatgggccccaggggcaggcataactcaacaaataaaggagatttctgaatcagtaagtcataatgagaccactgagtgaaaacacaatgtgcattttcacttttttgaggcctacagcttctggaactgctggtaacagaggcttgatgccctgggctgagagtcaggtgccaggctttgtctgaattccagcctgctggatgggctgtcccccaggaagtcctctctggggctagaatcctgcaggaactggggaagagctgtttgcacacactccagctgtagtgcctgtgagatgcctgagactctgggacagcaagttatgtgggcagagtagggtttcagggtcagataaacctaaccgagaagtcctatctctgccacacacatgatgcgtaacttcggaagcttgcttaatctttctgagcctcagtgtcttcatctgtaaaatgggaagactcataataccatatcattctggtatccttataataacctatatggctattttgaggcataaatggttgaaggagataatgcatgtaaagtttctcttacctaccatgaatccaataaaggttaacttcaaactcctcccccatgtcacattccactctcccactcacccaaagggattgcttagaccacccacctgctccctctagttgcttctgctgaaacttccccctgatgagtaagaaaagtcgcatttagtataacttgctgtctagcacagtgcctgcctgccacatggcagatactcagtgaatgattcttaaatgaatggatagatatggggtgtatcttataccagccctaggcctgtttgtccataataggacccattccttaccttctcccactctagtgtgcattgcaggtaacttacccctgcaggttgtgtttttcaggctctcctgtcagctatttaggtttagccaatgacatgcactgggagattggagagaaggagaaagggagaagccagggtattacaactacaattgccttccttagcagcaagggaagcacctccttgcctccagctcctactagaatcccactgtggcttcaggttccagcaggtggccccagctcctgagcactgccaactccaccacctccctccatcccttcagcccaagggcaggcagtgtctccttgttgctgcttatctctgagtttctccactttcttctatctggctgctcaactctttgtaacccaggcaaccacttctcagtagttaattccctctgctgggtatatctgaagtggtttctaacattgtgcttacaccccctttggaaacaggagcgaccgaactcagagttaagagaacttcactcctctgtgctctaccattcactggccatgtggccagtcaggctttctggagcctcagtttcctcatttgtaacaagggctaaaagaacccatcctacttctcttccacagggtcactgtgagaacccaatgagggcatccaattataccttttccatgtactactgagtacctgctgtatgtcaggaccttttaaaggtgcaggggatggaacagggaataaggcataatgtcccagttctcaagggggttttggttaattgcaataaatgtgccttgtaaactgcagaatgctgtataattctaagaagataagctgatctgacctccgtgactcccagaaaacccttggggatgtccagagctctccagcccacatcttagggacccattcctgccctagaggaaggtgaactaggatgcagtgactgcacaatgatacgtgcacagtgacctggatagcaaaccaaggtccctcctcccaaccagaccgaaccaatgttccacttgtgtgtgtctattagcgtgtcagagctcacttaattaactgtaaaggattatcctgattcttctgctgtactggttttcttttaatggtttttatttggtgttagttgaagtaagcatgctaccaaataaagcctgcaaatcttgtttatgtctagatagtgtttgaaaaggcatcctctataacacaatttttagttattgatgacctcttttataatgatttagtcagcctcactttaatgatagtattgataacaatatatggctgacaatctatctctaacaatactccaaggggcaaatgaaaagcaatttgtgcatgtgtggaagataggtaaacttgctgtttttaaacaacatgaaaatggagtatattaatccagatgcaacactctcctgtcctaagcatttttatatggtctctctcacattgtcctatgaagcaagtatttccatccccattttaatgattaagtcactaagacttaaagaaacaggtgactaatccagttaggtaatgacgaaatcagaagggaaggtagaaaaatgagaagtgcttacctccctgagcctccacttcctcatctataaatgggagcagtaactgagggtggtgttgagagttaaatgagagtagcacaatgcctgatatgcagtcattaataaacagtagttctaaaggaggacattagctgcgtaaggcctcttatcaaccatccccttgatttctgctctctctgcagacgaccattcccgggtgaggctgctggtgctggatggagacccgcactctgactacatcaatgccaactacattgacgtgagtgtcttaatggggctgggggctggggctggcttttgcaggctcaagatctgtggtttaccccaaactctcctccagaaggtggcccttccagagcagtctggatcctccttgatatgtggaactagtgtaacccaagttgactgtccatctaccactgcatccactttcaggctagctgtagtagcctgctctatggggcctcaggacaactgttagtcttactcattcaccccatttattcatttgtgtatatgtctgttgatccattcattcattcacataaacgcatggccatttatgccacaaaaattttaaagtgcctactgtaaaatgtatactagatgctatgggaaccataatgctaataataccatggtctctaccctttaaaaccttagcagggagataatgtgcacatcaataattccagggcaaagtagaaattgttaagtgtcaaaagtacagataacatgctgcagagattcagaagtagggaaaaatatcacttctcccatcaggaatgcaaaatatgatgtgaaccaaagcttcaagcacagatatgatttaaaatcaaagagaggggagaggggcctctggttagagagaatagcacaagccaagatggagcaactggccaggagatacatagcagctccatttgaggggagcagagaatatgtaacaggaataatggaaaatattgttgggactacatcagtgaagattaaatgctcagacttaggaagtgggactttatcccatagacaagaggaagctattaaaaattttttatcaaggaggtgaccagcttagaactgagctttggcatgatttatctgctaccaaagataagacagatccgagggaagaaattctggaattaagacaactacaaccaataaggaaagaggctgcttcaatattccagagacgactgaggaagggactaaactcaaacaggagccaagaagggtatgcatggaagtgagagaatttgctaagcaagagcatgactgctgaggtcagaaggacaacccaatgtgactgattcaagccatgcatctcaggacctcagctcacagtccatgggtcttgaagaatggcacagagattcatactggtcccctagactctcaaatgtatttatagataggctataaagtgtggtggtgcagtttgtgaattcccccttaatctagactaagccaggtgagttattaactcaacaaatacttattgagccttgtattgatcatctgactgcttgccctcagatctattttgtgtccttccctgttctgccttgcattgcagggtgtgtgtgtgtgtgagagagagagagaaagagagagagacagacagacagacagacagacactggaggatgatggaagggcagtgtattctccatctcactcccttccttgggcagcaactccagcagtggctgtaccctgtctgtggctccatctttcctcaagcaggcctgccatagtccagtctcctgccagtcagcccactggggctctggttatttctggactctggactctagttatttctccctctcctgttctcccactagttctaagggttggttgcagcctactcctgtccctgatctctgggttgccccactattctctgtttggcatcttggctcctccatcacttgtgtaaccaactccccatactgaattgcctcgtctgaaacacatagactggtttctgtttccctaactacaccctaattaacaaagggcctactacatggccaagaactgaggctgcaacttcagtggagttgaagatgaacaccgtctctgccaccatagcccttccagaaaagttcacaggagacagccagttctgaatagcttttctccagcccagagcaaggcactctgagcatacatccatcatgccagcagcctttccttcatacatccagtattcagttcacaaacacagagcagaccctccactgtgtatgggaaatactgacttttaagaccaggtctctgacctaaaagggactcaaatctggtgagggagtcagataagaaaatagaccttcacagagcaggggctgtgggaccataaaggaaaatcaaagcttcaagttggtgggaaagggaagtagccagtgaaggctccctggaggaggtgatgtctcagttctgccttgaaagatgacttagagccagccaggcaagaagggtttatagtaacctaagaattactgatcacctttcatgtaccaacatcaccttaactagtatcacaacttcacaaggtaagtaccactactacccatttccagatgagtaagtgagtctcttaagattatataacttgtccaggattatactgctaggaggtaggggaggagggagcagaaatttgagtcaagagtacctctcccaccataccctgctgtctttaataatcacagtgagcaatgacaacaccaactggctcttaatgagtcactcttggggtcctatgatgggtggctcaagtaagtcagcttatcaaaacttcttaacaacccttcaaggtaggtgttctcattcccattctccagatggggagggctaaggtttagagaaatcacaaatacgtctcaggccatgcagctggtcagtggcagaaccaggatgggaaccagacctgaatggctcccagtttagcactctttctccttcccctccccccccccactcccagacaccgccttgtagccaacacacagcaaggaccgagtcagcatatattgatgcaggttgaattgattccttccatttctcctcgaccttgtctatggctgcatggatatgaccctaaggaccacaggccacacagggtctggcatgcctgagtttctgtatctggcattcatcatttgactagaatcccccaacaaaagtcattttcctagataggcactcactccaaagttgaatgagcatctgactacagtcagggccaagatacactttggtattttataggcaacaaacgaaattgctttaaatgcaagttaatctctacaactgctaattatgcctctgattcatttcctgttttatcattgcaaggcatgtttcaagcctttaaagacaggaaaccagagctgtaggttaagagcactgtccaaggtcacacaactgaacttcagttctctgcccacttaggacacaccacgaccttcttcttctgtctgtaataggttaggcagacagggcaaatggcctctgttcatgctgtcttattatgggatattgaactccaggctcaatctcagtggttagaatccagggccaataaagtcatgaatctggtctgtgttgaagacctgtgttgaatccaggcctttttgattactagctttatgatcttgggtaaattacttaatcattctgatatctataaaatgagataatgatgccaccccacaagtgtgcaattactgatgtaaagtatctgtcatgatcccaaaaggaaacataggcttccccaaagtgggtacccagggaaagtttaataaggatgtgaacaggattaagagaaaccagtagggtagggtgcagtatcactaggctaacaatagtagggagtccttaccagccctagacccagataagggaagagagtagctatgagagagggctgcccttcaagaactgaagcccttgattgagtgacaaggtcaagcaaggcatggagacctggcagggaggaacctagaagaacatatgccccaacctcctcctggcctctgagttcctgcttttgttccccattgactaaacccaatttgaagcagaaagaataggagcccatggcgcgatccatacagagcagaccatggaaggaaaaaggggaaatggagggacaaagggaagaaagccaaccacaagcaactccttgcacagttaccactatagggtgaagagtagaggaactccattaattgtgaaccaactacatactccagcaaagataaaattcctggggtctctatagggattcctggcaaaacagtactccagacagctaactaggtcctcactccatcaccctggtctccaacgcagccacaatccttcctggctctctaaagagctaactgcccatgctagaatcatttctctacaattggatcttgacgattcattaaaataactccattgggacaatgagctgaatggggccagccctgtctctgcctccggaggccgtggtctgttactgtctgaaccatcccgctggcaggtttgtttgcacacccgaaaatgtattggccacttaaatctgttatgaattaccagcctggaaataaatatcgtatctgggtccccagtaagtaacagatgcatgagtgcagagtgagataaatgcgttttggatgcaaacctctttcccattgctcacagacagatggaggcaggcccagtgctggtttgcagtcaatctgcgtgctgtgtaggtgggacttaaatgaactcaaagttcttttaaggttaggaagttttctgtactcgctcttggcgaatccccagaggagccccaattgagcagtacgtttccttttatctcctttgctgaggagtctcgtggttagaatgttttctctttggggactgcgtgggtttttggaagccaaggagggtctctttactcagatgcagcgtgggaacaggcacacagcatgcgtacattcagtcaatatgaatttttcaaggccaatggcccaggctgacttgtaggtgctggggacatggccatgagcaagccagccctggcttcatggagctcccattcaactgggggagcatgtaaatgaagaaagaatagtgtgctatttggtgataggttatctaacgaaaagtaagccagagaaagtggaaagaagctgatggggtggtcagagatgaactctccacagacgtgattgacaactgagcagaagcttggatggagcgagagagcaagccactcaggtacctgggggcagacatagcaggcacggggaatggccagtgctaaggcctctggatggacatgtgatccctatctctgaagaagagcaagagccagtggatgatgaaagaatggcagagaaactgggaacatcactgaaaggatgaaatagaaatgacaagaggtgtcaagatgcccaaactaggtttaaggagccaatcaaccaccacctcctctgaggggaccctccttggctgttcaattcccatgggtactccacagagtccccacatcttcccattagtagcctttaccccagtctgttgatgtctataagttgctcaaaagcaaagtccacattcatcgggtccacttttgtatttccagtgccttgtacatagtagtaggtgcttaatacctgttgattgacagtgaataactgtgcaaacaaatgaattcacaaaatagagaatccaagccatctaactccacaactaaaatgtgaatctcttgctcaaaatgttatctcactgaatttcaagcacattagaatcttccaaatcacagcttcctccagggtctctttttcttccagcctgagcattaagaggatgctccaacttcagctcaaaaacattcatacatgtatttcaccaaccagactgctgaaaactgcacccagctctgggtggcatgtcccatgtcccaggaggagaaaggtacaaaaaaatttactgcagcacatggaattgcattcactgagcatatacaaagccctactgggccactcaggaggaatgagtcagctctgtatcccagaggagagcatatttcaagagcagcttggtgaggctgaagcacagggtgcatggggttgtaggagtggacaaagagggacaactggaggtgaggctggagatgaaaatggagacagatgactagtccgaaggtaaggcatttggcattaccatgcagacaatagggagctactgcaggcttataagcagggaaataacacactcagtgtgcaagaggaagctcatggggttaggaagcagcaaggctacagagtgaaactgcaggcagggaagccagctagtggttggtgctgtggcctcagccagggaggatgagggctgtgggaatgagtgatgggaatggcagaagagggcagacttgagaaactgcatctttccaggatctaggggactattttctattcccaaagctactcaagacaacccttgggtttaattctttcttttagcctgagcagccctgtccacttgacttggaggaagggataggtcttcctaccccttgtgtcacagggaagggctcagttattacattaacacaaagaaggtctcatcatcccagtgtcccctgagaggcctgcatacacttttagtcttgataggcactcagtaaataaatatttgccaaataaacaataaaataacaatagcaaagacatatatgttaaatcttagaatagtgcctggcacatagtaactgttatatatcaactcatttaatctggtcaacaacactatgaggtaaataccattatccccattaattttttaattttatagatttagagagcacaagtgcagttttgttactgtatgtattgcacagtggtgaagtataggcttttagtgtaaccatcacctgaatagtatacattgcacctattaaattatttctcatccctctcaccaccctcctaccctgccaaccttctgagtcaccaatgtctacgattccacactttacatccatatgtacacattatttagctcccactgtaagtgaaaacatgcggtatttgactttctgtttctgggagttttttgcttaagataatggcctccaggcccatccatgtatccatgttgctgcaaaagtcatgatttcattattttttatggcttagtagtattccatggtacacatatatatgtatatacacacaccatggaatactacatctatatatatatatctcttcatatatatccatatatatatggaatactatatatatatatatatataaaatttctttattcagtcatccattgagatggacacataggttgatttcatatctttgttattgtgaattttaaaactgaggcacaatgagactaagtagcttgccctagaccacacaccctagaagggacagagccagcgttcaaacccaggcagctgagttccggagtccatggtacgcataaccaccatgctgtgttgcctgcctagttggtttgtcaacagcttgtttattgggtatttgctctgagtctcacattgtgctgagctctgtgacaaaaaaaattttaagcttagtagggagtgtttgtccttaagaaactgacaacctcactaagtacataggagtcctcaagcacagagttttagtagggctgttgattgctctgcggttaatccaacagttctggtcatgacattgcccctggattggtgccaacctccaactctagagcaggcccagcaattggaaggtgcctgcaaaatcattatcgagcaagtgaaacacaaaggtggagaaatgtacaagggacgcagaaacttgtctttgtatcagaaagtgggtctagaactttagagatgccacatctgtggcaccataaaccatacagatggcagttctatttcctgaagaaagtggcctcgaggcagttcatctacctcaacagggcaaaaagactggtcagcaacatctaagacaaagacagatgttcatcaaactttaggacttattttctctggacatggttaaccataaaagctaagtggatttcaggactgtcaacaatctcccaattgataggctctaaaattggcatctgtgttctttaaaaattttattcatctattcatttattcactcatgtatttatttaacaaatactaattgcattcagtgttctgcactaaatgcaggtctgtctccaaaacttaaacttctactcaatatgactgtaactggaaagaggacactccatgtatgccatgtccaggcaaaagaggggtcaccttcaacctcttgtccaatgatgaaggttatggggcagcagggtactccccaaccagagtacagcagggcctactgtagtgctctgaaatgtacagagaaattagaaactggtctttgtatttgcaggtatctttatgggtctcccaggtcagccttccataaggtcttctccgtacctgggacttcaattccaagcccaggaatgttggcatagagaagcaatgtgggatgcttctcaattttctttttctaattgttactaatggaagaagtcaacaattgaattgttttcttcctttttcttctctgggtgtcccatagggtcttgtacagtgttcttcatataatcatggctcaagaaagactttttggtggttgatgctccccataaacctggaaactccttctctacctgtttttgggtgcataaggataagcaatgcccatccaatctttgctcccagtgccactggctccaaggcaagcctatgtaggcacctcacaagtaactataaaaatagctagcatttagtgacttactacacactttatgtgcaatatctcatttaacctttgccacttctctgggaataactgatgctgttctcattttgcccatgagaaaatcaagacttggagaggatgtttattaatattgtgctgtttgcaagctttgacaacagactcttcacagtgcttttctcctgttatccagggataccatcgacctcggcactacattgcgactcaaggtaagtgccctccctccacctagtgcctcagagaggcttcaggggtcccaggggaaagggctctcttaactgcaaggcttgtcctctcctcctatatctgttactccaaccctcctttttcactaaacagccctggaggagaggaatgagtttccaccagcaaagaagccacggaggggtaggctgaagactctccagaggtccttgagattgttcatttgtttatttgggaaggaaaatggtggcaagtttcactataggaaaaaggcccatgagtgacagagcaaggagcttcacttggtcaggagggagaggcccaagcaggtgccatcaacacctgccagggccggagctgatggtgccttatctccacgataggtgcatgcccataacagatatgcagctggctgccctagaaagtaacttggcagtgcgttttcagaaggcttaaaaatgatcgtacctttcaaacccttctggaaaaaaatcctgcagataattatatatatagacaatgacgcatataagaacattattcacggtgttatctataataggaataaaaaagcgaaaaatcttaaatgcccaacaattggtacgttggttacataaagtgtgttaccgccatattatagaaaacttcgcagctattaaaactgttacgcttggtaagaatttttaagggcatcagaaaatgcatataataggtctgatgcttattacagtaaatacacacatatacatataaatatagaaaaatggtattcaaacttttatatcaaacacatgtattacttttgtaattttaaaaatgatgaaggcccaggacattgaaagagtaatttccaaggaaattgctttggactgtcagagcctattttctgctcctggtcttttttttttttttttttttttttttttccttcctttctgttgaggccctagaggaatgcctccagcatttgtcaagcacaaaatcaggcatctcctgtttttgttctcagcgtctggcaccctgcagctctctccaccccccaccccagttgccttcctgtctctcatggaggttctggagaccaattttcgaaaactcccttaagccataatacagtccagataaggtgataggtggagttggtagaaagggtctgagcaggaggaggacagaagggagaggagaggctgccaacatttccagtagatgctgcagattgtgagagcttggaatgagcctttccccatccataccctaatctgtccccatcaggctcacatgtctcaggcccgtgtctcagatacttggtgtcttaacaaggatcacctggcctcactcctgctcaccagtgtggagacttgaccaaccggggggacaaaccttctcagctgctgctttgcacttgcattctctaacctcactgtcttctctgttggcaggtccgatgcaggagactgtaaaggacttttggagaatgatctggcaggagaactccgccagcatcgtcatggtcacaaacctggtggaagtgggcagggtaagcctctcctgcactcgcctgggcagaggatgctggagatgcactctcgaacatctctttgttccatgcatcgtgctaagtgcctcctagtcagtatttcaccctcacggcaacctacaagggaggtgtcatcactcctattccacattcaagcaatgtcctttcccttcaaatccccttcatccctttttacaccctcactctccgttgatgatgtcatctcatatattttgaggaaattaaaaccatcagtcgttcactccctcattgtcacaccacaatcctacttgtatctacaactgtcctcttgttcttctcctctgctgtcagatttgactataagaaatggctgtttttgttgacccaaatggtcgaatgtcaactgtttcctatggctcagcctaacacaacagaagccatgtctctgcccttccaaaggcaagcatagtgcctggatcacagattctactcaataatttttttcatttttccctttctcacttgcaaaataagtctctttctcattgccaaattgttccccttagcatacaaacatgcccagtaccttccatcttaaaaagaaaggaaaaggtaaataaaaagtattttcttgttccctcttttctgccaaactttaaagactcacagggtggctctgtttcttcactcatgttctcttctacccaccgcagcgtagctcctccctccatcccaccaatagtgatattgtcaatatcactcgcacccttcatgtcgacaaatccagtctccacttctctcttctcatcttactcaatctcagcagcatccaaccctttgctacccgctcttcttcccctgacctctaaatcttgatgttcttcagggctcagatcttggtctcctgctctgctccatctcaactctctctgaagtggtcctcaactactcctggggcttagaaatgggactgctattcccagcttgcttttgcctacttagttaactctggcatgtgggtgggctgctgagtttaaaggcaaggtgtacaaacacgagaattaaaagggctctctacacatcatatgaactaactaaaatgtgggcaggtaagtttttgtttgggtaagaaacagataattcataaagatgaattctggcctctgcgacgatgggaaggagacaatctgggctttcgtaatccaataaaggggtatggacatctcagggcctaatgggaatttaggaccaggtgagactttacccatgagtccacccttatctagtccatcactcaattttacagatgaggaaacagacctaaaggggtagagtacctaccctgacgtcactcagccaaaacctaggcacaaaatctgacgctggactctgattccagtgcttgtggtcactccactcagactgttccccagggacccaggcccagggtgcagctactgtggacataaaggccagcccaggattcagggattcagaggcaaattccagcctgttctacaatatatcccccattggaaacagattcccttgatggatagaccataaatctaaattggatttggggaggaaagcagtctcttagataagctcctgctagtgccaaacactgtgccaggtgcttattgtgcattaccgaaacctacaaccatcataggagcccatgttcctagttattattcaagtgccctgggtttgcatcctggccccatcccttaccaacagttgaccttgggcaattttcttagctttcctatgcttcctcgtctgcaaaatggggatgataatatctacttcataaagttgtgttgataagtcattagaattaatacatgtaaagtattcgcagaacactttgtgagccgtggtagacagagtacacagtcagtaaatgttagctatcattattgataggaagctgaggctcagagaggcttcagcactttcttgggccacccagatactgagtgttaggaccaaacaatgaatccatttgcccccatgctctgttgcactataccagtgtttccctaagtgggttccatgggatgctagtctgcaggatgattagtgagaagagggttccacggttaaatacgtttgggaaatgctgcgtcctctgtgccccttttggagagtcgcaaaacacaaaacacattagcactagcatgagaaagaagctgaatagtcctgtagcaaagctgcctatttaactgtgtaatacagcatttcccaaactcatttgaccacaaaacctttttttgtttgttttttgtttcttgttttttacctaacacctattagcacccagcggaacacactgtgggaaatgccactctaggccgtgcggcgtcccccggaatggtaatcatgcttttgttcttttaaggggaaaaccatgatctctttttcatccatgagtgcgacttaaacagtcgactggggaatggcttgctcgcgtccagggtcagagaggaactgcgcatcttcccttggagtccagcagctaccatccttttcccaaccaagagcctttctccttccagacccccaactgccacctcttaatgatgtccccctcccaaccacttctgcttccacctcctatttcccaccttttattctcatctttgctcagctgatgatactcagctgctccaccctgacagagcagaaaggggactcagtcagtccccaaactggccacatggccttggacaagtcaccaaacctctgaacttcagtattattttcatctgtaaagtggggacaataacacccacctatctcaccttgttctatttgatgacatagtgtgataatgcattggaaagttacaaggagctttgcaaaagaaggtactacaattatttctaatggctccagtgcctctgggagtgagcttggccctgtgcagcttgctgatccctggccagctgtgaaccctgtggactgaaatgccaccaaagtcacccttgggtttatttggatgggacgaccagatgagacagctgctcacactcagccatgtgcttatgcatccttgtctctgttctgtctctgtctctgtctctcacttggccacaggtgaaatgtgtgcgatactggccagatgacacggaggtctacggagacattaaagtcaccctgattgaaacagagcccctggcagaatacgtcatacgcaccttcacagtccagaaggtaagcttcttggaggctgtgggcagccggtccaccatgagagccagcttgtttgttcatccagaacatgtggtaactgagggtctgctctacgtccagccccatacttggcaccagcaacagatcagcaatcagggcagacatgggtcctgctaccagggatcccacatctagtaggtggggcaaactgaattcaataagcaaatcaatgaaataacaacacattgtgataaaagccacacaggaatatgcaaaggatggagatagaaatccacagtaggatggggtggtaggagagggcctcttagcagaggaggcatttgggcagagaatgagggaggaggaaccagtgaagggtagaaaggaaagaagagctatcccaggcagaaggaaaaaacatgcagtctggaggggaaaaagtgatctcaacctgttcaaggcatgtggtctcaaccgggggcattttgatcccccaaggaatatttgtaaatgtctggcaacatttttggttgacacaacttgggggagaagggttaggatggtactggcacctagtgggtggagaggccagagatgcttataaacattccacaatgcacaggacagcctccgacaacaaaggattatccagcccaaggcatcagtagtgtcgaggttgagaaatgctggtctggacattaaaaggaggccagggctgcacaagcttggtgagcaaggatgtgattgcaaataaatatatttataacatgttacataataattgctattctatcattactattatatcataatgatagctaacacttactgagcacttactggaccaggtacttttctaaatgctttgcgtagagtaactcagttaatcctcccaataaccctataaggtaagcactattattatccccattttacatatgaagaaactgagacacagagagtttaaatcagtcatccaaagttgcccagctgcaaggttggtacaaccaggattcacaccttggctcctgtaacacatttctctttccattacaccataggttccatttctctaaaaccaatcactttaatagacaatgtggccacaggcctaaggatgcaaaagcactggggacttacatgctttgagagctgtgcccttgaggctttgacaagtccttgcaagggccaaagcaggctgctctgcagactagagcccggcatgcacacagtactgttccagcatacagagtggcctaggacatactgtttgccccggaagctccccctccaacccccaggctcctaaagtctcagggtctttttcatctgaatctgcagtctcgggtgaaaaagtcaggaagcctgtgaactccctccactaagaggaaggaaaccatcggtacttcaatgttgccttaggtcaggttttttagaagcagagcctgaggcaaggattcagaaacatgaggtatatcaggggagctctcccaggagaaattcctaagagagagtgggaagcaggagagggaaggaaagacaccaaccaaggacagaggctccagtgaagtctagcctagagctgatccacagggaacctccaaggataaactatgccacagagtgagttgtcccccttaaggcgtggaagccagacttctgtgctcccacgtcagtcagtctgctgatcgtggaccatccactgaggggtaacctccagggtgggccagcccctgtcagctgagggcgtgtctccagagaaggggacaattgaaaggcagtagcaaccaacagtccctgcagctcaggcctggaagcacaggcccaaggaagaggacccaggggtaccagtctcatctgccacatctgtgttgaatgcccgaggatgggatgagtgactggcgacacgggcagggaggccttgaggaattgcagctagcaaaccatgttgaggcattaaggtcctttctcgtgttacattttctttgtcttttaaacaaccacgagggaagatattactcacagggagatgcccttaaaagaccccaagggcctctgaggattaactgggcttagccagcctctccacagcatgcaggcaggcactcagcaaacattacctgcgattttagctcaaaatcggttcctgagctgggaacctggaaataataaacagggagtgctgtctgcccttgaagacagcacagacgcatcggggagagaggatccttgataaatcatcacagcacaggtgggaagagctcgaaggaaggcttcttgggactgaattgatttggaggatggcgtgaaaaaagtccaagtattcttgaagctttctcctctctcacttcagctcattcatcactgccttcatctgggcatctgatttctccctcctaacaggactgtctgcctctagtcctgcccctatgttagtttgggtttcccagaagcagagccagaagcagcagtcgtttgggtgccctggctcatgtgtttagggagagtttgcagggggaaggcagtgagagagccaggatggggtggggaaaggagctgagtgaggaagtggcctcagcagagacttgcttccacctaaccccatgggagccctggaacatgaatggtactgcacacttggtccaaccttgaggcaaaggggcctcaggtgccccccataagggtaaaaaaaatttctgtttttcccagaacattactggttttagcactgaaagtcccacgtaccgggcaacccgtcagtcctgggcagactgagcaagtggcaagccagttggtcactctccctctactatcagtcagtcactgaaggatgctgccccacccagccacaccccaggggaggggggttcctgttcagctgagaacagttctcttcagaagagggtaactgtgagctgtgtgcagccacgactcagagcaggtggcaatgagtccactggcccagtgatggggatctgagtgggcaccaatagtgccctctctgcaacccccgatccacccacctgaatccatccttcatgtagcaggatgcagcctcctaaaatgcaagtctaatgatgcacttcctcttgtgtggaaccgtctgtgtaatctccctgtagcttcccagtgcctttgagataaagtccaaaggccttaatgtagattcaaggccttctgggatccagctctcatctattctcctgcacccccaggcctgtggtctcccatggcctgacttccacttgcctctagcattgccctgggttgctagtgattctctgcacacaccatgctaagccctgtccccaggcctgtgcccatgctgtccccctgccttggattccttcctcttctcccgtcaactgggtaatactcacacatcactatattagaatgattaagagtgcagactgtggagacagacagccagggttcacatggtccctttacaacttgtgagttgtactgtgaccttgggtgtgtcacttaaccttgtttagcctcagtttcctgatccatcaaatggagataaaaatatagggatttatatcaggattaagtaagttagcatgttgaagtgttcagaagagtgactggcacacagtaaatgcttagttaatgtttgttagttattattttcactattagtctgtttcaagatggaggtcaagcatcacctcctccagaaagccttctgggatttctcttctcctcagatcaggttagcaggcactcctttatccacttcaatagaattacccacttgggcatctgcctccccgacaaggccatgagctgttccagggataggagctgtggcttttattctcaccttcctagtacctagcacaaggctgggaaggctgggcacaggtcacacttggtaaatgatttttcaatgaaggaatgaatgaataatcaaacagactcttcctattcagtgttctctgggtatctgcaggagattgctaagtagaaaaatagtagggaacaggaactgtctaagcgaaggcttagaagtgtgacctggccatggaatggtcagaaaaccactactgggcccggagtgtgtctctgtgaggggtggaggggtgtgaaaggggaggggaaccgctcagagctctaggccccactctgtctccatcagatcagagaagctctgcctttgtttgtttcgcatcttatgtaatcattctaagtaagaatctacttaataaagaagtcagtactaagttatataaactttgaaagccacacagactatcacagccaaggctggaacactacagaatatcagacctcaatcactgaacgcctcagattccactggaaacaatttggactgacttggtccttaaggccaacatttctttaaatccgtactcaatacacctcctatgaaacatttgtcaaagacgatcccctaggcaaacaaaagaaggtctcctagggtgctctgtggccctcttgggcattcagagtgtgtatgagcacactcaagactctgagaaatcctgcaataaagccatcggtttcgttttaacaatcccatatttcccaaatgtaactgattacagaatcgctctatccagtaacacctattaacaaacactgtgagggccctgtccctgcgggaggttcctcagtgcagcagctatggctccacgtgttgctgggctgggtatgcgagggcagcagctggaagaacagaggcccgttctttcctcagaaaggctaccatgagatccgggagctccgcctcttccacttcaccagctggcctgaccacggcgttccctgctatgccactggccttctgggcttcgtccgccaggtcaagttcctcaaccccccggaagctgggcccatagtggtccactgcaggtaagtcaaaggtccttcaccttgggaggccgaggcgggcagatcacgaggtcaggagttcgagaccagcctggccaacgtggtgaaacctcgtctctactaaagaaagatacaaaaacttagctggtcatggtggcatacatctgtaatcccagctacctgggaggctgaggcagaggaatcgcttgaacccaggagcgggaggttgcagtgagccaagatcgcgccactgcactccagcctgggtgacagagcgagactctgtctcaaaaaaaaaaaaaaagaaaaagtcctccacctaccctagtgtgcctctgcagctcggctttcttgggagggacatgttatcttttctagtggctttactcttagagactcctcttcctgtgtcccccccatgcccagtgctttctgatgatacttggtcacaaggtcagctaacaaaaggaatagcagtagtggccattgttactgttgttgcctgaaaacagtgaagaagtcagtcaccagggaggcaggctgaacactggcagcatctgctgggtctgtcacgtgcattttacccacattatttacttctcgtccagtctggagaggtgggcattattaacattcccattttacagatacaaaaactcaagtgctgaggaggtaaacacagagtggggatatttcacctgcttttctccagacacttgccctcagctccttgacatggcagcagggcgccttggtggaagcatgcttcttttcatttctatattattttcaagatcacttgccagcctgcagggtccctcatagagagaaatggacagcaccaggttttaccttattatgaagaagagatattttcagctctgacctagaaagtcacattgagaatgagtggcatgtctttgaatcctcccaaatggagatgaagtatcctgtcaagggtgtccagaattggaggaggatggccttcctgacctgaaggctggccagctggcatccccctccttcccaacgcctctctcttccaatatgaccttggggcagcccatcttttcagaccctggatgcttgagttatcacatccctgccctggcagtttgtgtcagtcaagagaccatggaagactccataagctgtggatgtctcagagccagccccgtcctcatacagcatccatttatttatcttcccagcaatagtagctacacaaccccatttcacagataaggcaagtgaggatgaggaggtaatcctggactctctaaatgttttgcatgtattttctgctttgctttatatctcatagcaatcaaagggcaatggatcattaatgccccccatctctatatcccaaagagcacccagatcaagggttagggagaaagaaagaaagacaatggcaaatgtttgtttatcatcaggacttcggcgcatgatggctctacgccggtatgtgtctccttagcaggtcatcttaatgcatctgagcagagtggtacccactcctggggccattctgaaaattattaccaaatgggttggctaagtgcctaagagagaatgcctgacatatagtaagcactctaatatatcattattctctgcctcctcttaatgttttctttctccccctccccagattatttattaatccttcaggacaggaacaatgtttgtttgttttcatattcccactcctaataccagcatctactgcatcttagattttcaataaatatttgttgaatataatagtaataatttctcaataaaaaatggctatgtatccaggcacaaagcaatttgtatgcattatgcattttaattgtaatttcatccaatttatacatattgtgctattaatgctgtgaggtggatctattaattattatcaacatcattttatagatgagtgagtattttaattattatcaacatcattttatagatgagtattgaaacccagagaggttaagtcatttgcccgaggtcatgcagctaataagtaatagagccaggatttaatcctagggggtcttttcaaatatcctgtgttcaattactatgtgatgctgaaatgaaataaacacagctttgtcctcacaaggaccctgcagggaggtatgttaaaagcatcagaaatctgaagctaacaaacaaacggacactaggcaacttggtcaccgctgattgattgatagttgttccaaaatttggaaccaaattgggctgattctttatactaaagcatggtgaatatgaacattgaagaaaaaaacacgagtgaccccccctatactccctcccagacacagaggccaagtctcttgagtccccgcatctggattttggggagtaggttctgaagcaaacttaagtcagacttcattcaaaccatgaaagtttctcatgaatgaagactctgcttccaatgggtgtactttccaaattgttgtaggtagtggtccgcactggcctgtgccccttggatttaccatgagccaatattgcttttttgtcttgttccatctctcttcctctttgtgtgtcttttgacatctacattgttagacaaagacacttgtttccatgagaaaggcaagatgtgaaaacgcagcggaagggggcctccttgacaggctgcccggccttcccatccaaaactgcacatgtgtaaggcacatgtcttacgtgcctcttggtcagcactgatgtttcagagcccagcactgatctagaaagggctggccaaggcccatagagtctcgttgagttcccctaccattttatacttggtctgagattctcctaaagaagccactagtgaccagaaatcaagtaagtatgtatcaagaaacttgatccctgacaagggtctccggacggtcagctgctccagtttcatgacactcttgcttcacgatcctgcgaaaacagctgcaggtggagccagatgccggcctttgaacgtggtgctccaccaaccactctctgtcttggggacagctcagaggactctcgtttctgtcctgtcattcatctcccctctgttctctctcctctccttctttgcttccatccgtcaacccatttgctgaagaagaaaaaagaagagaaaagaagggtagaaaataggaaagacatatctatgaggcagctccagcatgccaggaaccatgctaggtgttttatgctatatggatgtattattttatccatcagacaaggcaatggcatgtatatgtgtggtttgcacatgcattacaaactatacatattaagaaaggaaatgtgggaacacataatctagagcctcccagcaggacccttggggatagggctgaatgctaggggcctccccagggcaggttccccccatgaagatccttaacacagaccatacctctcttccagtgctggggctgggcggactggctgcttcattgccattgacaccatgcttgacatggccgagaatgaaggggtggtggacatcttcaactgcgtgcgtgagctccgggcccaaagggtcaacctggtacagacagaggtgagtcctagggggccaagacagttggccacctgtagccctgaccaaggagaaacatgatgatagaacggagagacacataggtaggggcatcctatggaaaggacctgggtgtgagagaagcaggagggagtagacacgtggcttactatggtgagactactgtagaagctagggtgccccagccaaccctggaggtctacagtgcaggcagttccaccaatgaagaatggtggtgagttctccatctctgaggccatccaagcagggacagaatgacaaatttcggggattattggaatagtattcttgccttgggtgaagtgatagagaaggaaagagaaggactggcatttattcagtgaccactacgtgccaagcgatggttcagtcactgcagggaatggtttaatcaacaaagtaattgagtacttaagctgggtgctgggcatttcaagagatgtaacacacagcctctgccctcaagggagaagcagacctttaggcaactctctgtgcagttggagagcccaaacctaagagtattgaaaggaattaatctttattgttgtgtacctactgtgagccaggcagcatacattctttctagtcacggtattgtttctactcctccaaaccagctatggtgtagctcctagtattatctccaatttatcaatgaagaagaaactaagaaattgtgtccctaagacctcacataccagactgtggtagaacttcggtccatgtgacccccaaaggcctctgctttttcgccagaaccacactctcactaagcagccttttctgcctatcccactctgtaccttggcttatcattcctgtaacgagcccatcttctgttctagtgaaggctctgggtgcctgggcgaccagagctgggacagatagggaactatgcacatcatcaatcctgcaaagggaagtgacccatggttttggtacagccagcctctctgaatctgcagtgaataccaccattgattggtttacacacataggctctgagctaactcacacaggccagtcttcaggcttctagcactaaagccaagagggctgctttatctattcctaggtccatgcatgcagaagccaggcttgctggttgcagtcagacatatggggagacatattcaaatgcagatgcatcacatagcatctggaaaagtactctttatagagaaactgaccaagttctgcagaaaaagtcactcaacaaacatttatctggggcctagaagtaacaccaacttctgcctggtggattaacagatggctttccagaaagaatgaaacattaaaggtatggaaaagagggagtggagtttcaggaggagagtacagcaggtacaaagaattgagataggagaagatatgacacgttttgggagcagatcgtgagacaaagatttgccggcaaataatttgcttggaaggtaatcccaagacacagtggctggtgaatgggaaagtgaggcagagcagggaaggaaacaaacaaaggctactttaacaagttgttaaacactgtagacaactggaacccaattctgctggcgaactctgagacacatgcgtgtccaagtgattccacctaaagggagagatttcttagatttctatcctcaactctccatctgtcattgcttgagggttcctttccacacagcccaagtatcccctctgccttcagcagacaatcacaggtgtttgcagcaagcagccttcctcaggtaaaggtgaaagctgaggggacatgggctggacaccaagagcgcctgctgacagcatgtctagaagtttctcattttatcatgactatgctattacatcttctatcagaaacaagacccaccatagctcaggtgatcattaggaaacatggaaatttggccctttgggttacagtataaaaagtaaggatcctgtaatatattgataaatcatgtctattcttcatagccacaacactaaatgtggacagctaattcccaggccactgttcttacctggcaccccattccctctcttctgactttgcaggagcaatatgtgtttgtgcacgatgccatcctggaagcgtgcctctgtggcaacactgccatccctgtgtgtgagttccgttctctctactacaatatcagcaggctggacccccagacaaactccagccaaatcaaagatgaatttcaggtatgagcaaatcccaggctcggtgaccatcttagtcagtttgggttgttataacaaatttccatagattgggtggtttaaatgacagacacttattcattacatttctggaggctgagaagcccagcatcaagcttccagtaaatccagtgtctggggagggctcacttcctgacttgcagatagccgtcttctcgttgcatattcacgtggtggaaagtagaagcagcaagctctcacatttcttcttttttttactttttatagagataggatctcactatgttgcccaggatggtcttcaactcctgggctcaaggaatcctcccaccttggtctcccaaattgctgggattacaggcaggagccaccacacctggccctacatgtttcttcttataagagcactaatcccgttcatgagggttctatgctcatgatcgaaacgtcttccaaagtcccaacctcctaataccatcacattgggggctaagattacgacatggattttgggagggatgaaaacatttagtccgtaacagtaacccaaccaacttcagtggctatgtgcacatttgtggggttttctttgggacaactgatctatgcactttcagtgtctgcttctctaggaagctgcagaatctattccagaacacaaaatgcacagccatgagcaactacacactcactcagggattgctggtacttgtctttaactgtgaatatgttttttaactgaggtcttattcagttctagtccaagttgtgaatggagacaaatttatacaaacaggtgtgaatttcatgctccttcatccctggagggactcaggtcctctcagtaatttttcagtagactcttactgctaaaagtgtggtctgcagcctgaccaacatggtgaaaccctgtctctactaaaaatacaaaacaagtgagccaggcatggtggcatgcacctgtaatcccagctactcaggaggctgaggcaggagacttgcttgaacctgggaggcggaggttgcagtgagccgagattgtgccactgcactccagcctgggcaacagagtgagactccatctcaaaaacataaaaaataaaataaataaaattttaaaacctgcagtctggagaccagcagcattggcttcacctgggaacttgttataaatgcagaatctcggacctggcccagacatagtgaatgagagcctgcaagttaacaagatctctgagtgatttgtatgcatgttaaactttgagaagtactgtcctagaacatagctcaggtataccagatccacacctggaagcccatgcggtcagagctgtggcaacattgattggtctagggagcctggacatgaatcactaagtaagataaagccagagtccagccctttatcccaagaccagtgtcagaattacacctgggcaacaggagctgagaaccaggtatgagaaagcaaggaagctccaggtcttgcttcaagtcagtgggcaaatgccaggcccattgttccacgggcagatatcccaggcaggccaataccttagcaatccctaaaacaaatagccattattgatctgaagtagagacagagagctgaatgagggaaggatggagggtacagaacactggtcattgcacgtaacatctagtccattggctagagcagttcagctctggcctcaaacttgcaagatgtactcggcaaagtccaaacacagcaatttcccagacctgttagggtttgcccctcggaggtctctcatctatcctgagcaggtcatctaggcatccttccatactcagacagctttctctctgagaagagggctggtaaatcatttcccccattccatgacaacgcaagtgatgtttagccctcagtagggattccctacccccacccctctgtatgccctcctggctggcccaccctttaaagcagcactggctgagctgaacgacttagttcatctggttggcaggtactatgaggctgtgtctgagcctgtgtgtggatgcgctgcttctgcagccttggcgttttgaaggtgtcacacagctcacacaccctatagcagggagcaggagaggacagaacatcaccgtggaagagaaatgggtcccgggaaagggagagtggggctgcgcttagagggtggaaataggcgagttaggctgagttggaacattactgtctcttttgctcaggggcagccaaatgagcagggcctatctattcacctttgtgccccacagaccctcaacattgtgacaccccgtgtgcggcccgaggactgcagcattgggctcctgccccggaaccatgataagaatcgaagtatggacgtgctgcctctggaccgctgcctgcccttccttatctcagtggacggagaatccagcaattacatcaacgcagcactgatggatgtaagccgagcccgggcagaaagctcctagctggcattctagggcaaatattcttcctgaggtggaggtggctggacctcagggccctgaccccaccagccagccccccctgcttctgatctactagtcccaaggacctttgttcccctgcaggctctggtccaaacctagacacaaggtgggctcttggctccttttctcatacaaagagcctggaaagaatagaccagaagcgtaaggtggctcccgtgtcaccatggcaagtctacaggcctgcctagcaacctcttccattccccacagagccgactctcagcctgaagtttagtaaagcaggtattttctgtgctgggccttggcctgagcgtgggaacacaagacggtgcagacacaggttctgccctctggtagctcccatgaaggttccagataactcctgagcagagacaaaaatgaggatggcgcacagtaggggctcagtaaatggttattgggaaagtagtgggaagcagtaaaacaagcatggggtggaagcgggctgtgttcctggctgtcctgtgagggccactgccccccactttcttgtcatcaggtccaggaaggggcttcaccctaccctggtttgggattagggtcatgttcctggtccagcgagcctaagcttctcccctgcgtttttcggatacttctgattatcatcacttcccctccaaggtgtacaggtgtttgcagtaggaaggaactatggaccatctactaccagccatgcacttttcagcagagaaaacagaggccagacagagaaagagacttgctcaaggtcacccagggagctagtggcacagcccacacacagagctcctgggtcacactctggaattcatttcttgagcctccctgcaatttggtggatccaataagaggcaaacatctcacctcctgaggctcaaaaccaagaacaccattgcctgatataatgagcccttccagcttcccctccccagcccatctgagttcacatccatctagcccatgtggccctcctatctcactcagaatagacagaaacatgggatgctttctcctggggtcaaggccaacaacttctctgacctctaatcctcttgaagtttctcccaagggtctgggtgttagaggcaggagggtgatgatggaaggtcaatgcctatcccagctctctaggggcctgccctggcctctgtccacagagtgcccatatcctctgtaaaaaccctagctctgggttcagaatcagggagtcttggcttggtcatagcaagtagctagaggtggagagaagacctttggcattagcttatagcttagagccttctaaagtcaatgagcgcatgtatgtgtatgtgtgcatgtaggtgtgcattatgtgtgtgagtgtgatgagaaatggagcctaggggtgcgcccatacttccaatttcctcctagctttgtctcccacttctcccaacaccccctccctgccttcctcatccaggcaaagatcaaataagctcctggcctctacttaataggttagatactgcctggagtcaaatgccttctgccaagctctgatgctgattgtattctctttgtccacagggcatttctcctgtgagccatcactggggcctttgcctttctgatattaaaaacaaaaaaaagtcgtccttatctgtattccagcccagtcagtgcattatctggtaaccatagcagctttgctcctagcagaaaaatatgaagtcctctgggttaatttttaatgtttcccctggtaaaggatgatgttatccatgaaatggattgccggctgatccctgaaacccggcaggagcacggatctcgaacatattttcagataaggctttgtcaggcgtgctggcctaatagagcgtttatcacagagacagggaaaaagaaaagaaaactaacattcactgagtgttgggcaccatgtcgggccctggacttgcactgtcccattttgcatgtgggtattctcatccccattttctgatgaggtcctcggggtcagagtattttcattcatcacttgctcaaggtcaagtagctcagaaatgggagccaaggattggagccccaagtctgttaactctcaaagcctcaatgtttttccatgtctggaaatggctcaaagttgatgctgtctacagctagagagtttggcttttggaaaataaattatttgcctatgcccacccagacccctcttctgaacattctactggccaggaaaaggccctcggaagaagggcccccccagccaatgcacgcatgatatccatgtttgcaaggctttgtcctgctttttccagggtctttgccctcttccctcttgcttgtaactgcactgaaaacagctgtaactcccacagaaaccatcatcatctcttgagaaaacatatcaagcacatgagccactgatgaagtggagaatcttcccaatcttttcaaatacatgacttcagggtggggagaaaataaatagggccctggatgaagctgccagaccaccccaccccccccccccccgcccaggccattttctctgggcctctgtttccctatctgcaacacgggactgaatttattgttttattcactggagtggcactgtctagcatgtgccagcgacaataccagtgccaaggacgtaaaacaaagtcaggggtgtttctgccctgccagtaggcttacgttccggctcttgtttgctggccttttcacacgtaaatctcattcaatctgtgtgacatcattcctttggatttatgatttccgttttccaggtgaagaacatgagctttggaatcatctaataacttgccagtatttagcacccaccccgccaaaaaaaaagcactctacaaagtttgaatgaatggatgaatggatgaatgaataaatgggcaaatggatggacagatggatgactcataacttacaagtggtaaagctgtacttgaaccccaggtctaccggactattaataatgcatgtgtactttccactgccccattgactcacatgacacagtgcccaccttgccagggcaactcagcccctcactccagcctggaggcagaagggagcctgcccctttgggagaatctcggcctcaggccgacccaaaacctcgcccagcatcgtggccacagggatgcggccaatcccttatatcccaagaggtgtcttgaccagtagagcaacaaatctgcatctgaaatctttcatttcgtattgtaattatgattatttgctgagctccgaggcataaataatttatttggataatcccatcccagtgacactttcctaatgaaatgtcttagtttggaggagattgtgttcattatgagaaggtcccctttgccgccagggcgtggagagataaaagaacaggcaggtgttttgtataatctatttggcaggctctggagcctctggcctcagtccaggcctcatcatcatcagaatatcactgatggatgtgtaatttacgaagcctgtgtcattcctttgtcagagccacaagcagcctgccgccttcgtggtcacccagcaccctctacccaacaccgtggcagacttctggaggctggtgttcgattacaactgctcctctgtggtgatgctgaatgagatggacactgcccaggtaggaggaggccaagccaagccctaggtgggtcaggggggccatgctctaaacctggagggagatcccttgacagccggtgcctgccacatctgccccagccagctgtcttgtaataagcagtgtctggccacgagcatcagacaagccattctgctacctacagagggtcctgtcaccccccagacctccagcaaagactccccctgcctatgggctttgtccaactccccacccgggaccagactctgttgctccatctcacaagcattgattattgtcttgctccaaatcacacagatcttgcagagccaggaggcttcctcccccagcactgagcacctgcagccctgaaaaatacccagatgcccggccacactcacctcccttccccctctgcaatgcagcctgtacagacagagcctgggacttgaaccttggacacattacccactgaccaccccaccaagccccagttcctcacggttgacctttgttccccggcaggcttcctgccttagcccctctgttctgatagctccaagcatcacgtgcctacagcatatccccatactcaggacacaggacgtgtatcttggaacagtttctatgccagggcagccattctggggtggaagagctgagaatggtccttcagatttttaaaaacctatcctttcactgccttaaataaaacttaaagtaacattgaattcccatatgagagctggccttgtgcaggccttggatgggaatttaaaaattttttaaacagacctgagctatagtttcagccctccaaaagcgcatggtcttgctccagagacagatgagcacattgtcccaacctcatgtggctgtgttataatagaggtcagcagtgaagtgctgtgttggccaggagcagggagcaatgaattctgcccagagggtgagggaagacttcaaaaagaaggtgactttggccttgaagaaggcagaggagctttaggcatatggaggctgaactcactgggaaaaggcatttcaggcagagggaacagcagaggcaaaggcgaggcaggggatgaatatacacagacttatttgcggaacagtttatgttccagtgtggctgggacctagaggaatatcaggaggagaagaatgtagtgaggctgaaaaatgcagcagagcccagcttgcagagaggtccctgtgccaggctaaggagcttgggtcttggttggcagcatagcaagcttcagacttctactttgtaagcgacagaatcctttctatgaataaaagctttcatgcaagcccaatgtatgaaatagggatgaccaaaagctgctcatgatgaagcagtaggcaggggttgggcttccacccacactgctgtctcattttctcctggtgcccttagaggggtcagtcctttgtgggaccactggagtttggaggagcacagttagaaatactttctgtgcaggaaggtgaaacactggagggttgacagtggtataacacagccagggttcctgttagaaagatgggtctagaggctgggcatggtggctcatgcctgtaatcccagcactttgggaggccaagagttcaagcccagcctgggcaacaccatgagaccctgtctctacaaaaaaaaaaaaaaaaaaaaaaaattttaattagccaggcatggtgccatgtgtctatagtcccagttactcaggaggctgaggcgggaggattgcttgagcactgcaaggctcaagtgagctatgatcccaccactgcattccagcctgggtgacagtgcaagaacccattttttttttactgactcttactgtgtcatcccgactggagtaacagtggtgcgatcttggctgactgcaacctccgcctcccaggttcaagtgattctcatgcctcagcctcccatgtagctgggattacaggcgtgtgccaacatgcccgactaatttttgtatttttagtagagatggggtttcaccatattggccaggctggtctcaaactcttgacctcaagtgttccccctgcctcggcctcctgaagtgctgggattacaggcgtgagcaaccacatctggctgaccccatctcttaaaaaataaaaaaaataaaaattgcaaaaaaagggtaagaataaaaagaaagccaggtctggggatcagtgcaggtaaaaggccggaggaaagacctggaaaccaggagaccggggaggagaatgttgcaaatgtgtagacaataaaggtagttatctgaactgcagaagtggccaggaggtgagaggactggaattggacgtgaaaacatttccagacttaagtccccaaggtttagggagcaggtgcaggtgggaggtgaataagaaggaaagttgcagataatggcaggaagttgagtctgggcaattaggcaactggggatataactggggaaaatatgaaagtcaggaaggtaggggaaggcagcgagaagagcagatgaacaggggatgaaattgagtgcaccttgggatgtgcctgtgagagacgttccggagagagtctattgattcaggcaacccatatttgttgggcatctgctatttgctggaagctattctaggtgcttggaatgcatcactgagcaacacagacaaagcgaggcataaaaaaaaattgccatctctcatgcaacttctcttctaaagcaggagacagataataagcaacacacattctctaatgtgctcaattataagttagaaggctgacacgagtgtttggaaaaaggcaaacaagaaggcagggtagtaaagatcagaacgttggatctgggacatagaatgtcattgcaataggattgtcaaggtgggccctatggagaagaacacatttgaacacagacgtgaaggaggtgagagagtgagccatgtgactctcaggggggcatcacaggcagagggaacacctgcacccaggctgcagggtaggcatgcacctggtgcccttgaggaacagcacagaggccatgggcagagcagcacaactgtggggaaagcagcagaaggtgaggtcagagggccatggaagacatagaagaacttgggctttcactctcagagaaacagagagccatgcacatgtttgaagcagaggagcaacataatttgccttttttaataaaagcatccctctggctgctgtgttgagaatagattgttggtgcaaggatggggaagagtggtttctgaaatggaagcagagagaacagacaagagactactgtgataattcaggtggcaggtgaggttggttgaactggggggtagattctgaaggtaaagccaacaacacatccagagagattgactatggaataagagagagaaagaggaatcaagggccaggcatgcctgtaatcttacctagcactttgagaagccaaggaagcaggatcacttgaggtcaggagttgaggccacgagttaaagaccatcctggacaacacagtgacaccctgtctctacaaaagaatttttattttgagatggagtctcactctgtcgcccaggctggagtgcagtggcgcgatctcaactctgccgcctcctgggttcaagcgattctcctgcctcagcctcccaagtagctgggattacaggggtgagccaccacagccagctaatttttgtatgtttagtagagatggggtttcccaatgttggccagactggtcttgatctcctgatctcaggtgatctgctgatcttggcctcccaaagtgctggggttataggcatgagccactgcacccagtcctacaaaataattttaaatgaactgggcatggtggtccatgcctgtaatcctagctacttgggaggctgaggcaggaggatcacttgagcccaggagatcaaagctgtggagaactgtgatcacaccacagtactctagcctagggcgacagagtaagaccctgtcaaaaaaagaaagaggaatgaaggataatgtcaatgattggggcctgagcaatagaaggttagaaactgagataactataaaaataaatgaattctcataaaacagagagttctggaacattccctgcagagttttggagtctgaaggcatcaccaccctacgcttttggctgaagaaataaaagaatgaactcagctcatgagcctgggcatgaagtctggcctgcaaaaccctgtttgctcttctctttttcaacatccctttctgcaaaaccagagctcaggcacagaggatgactttcaaagaacttcacttcgggacatataaaacctttgaaacaaaggtcaaggtcattggctatagctccccctttcagggtgggtcctgggtgaatgaagaatctttcaggcccagatgttggtacagagtttgagaactgattctctaaatgcaaaaacatcaggctcagaagtaccctgaggttggctgccatacgcagctggcaagcattccctgaaaccggcagatgaatagagcacttattgatataaatatcatcaccgcagcagctgggcgccttatgaaaataaacaatgacacaggatgagcatcagaaaagccgccctcagcacctggaggggcggttctttgaagcggcgtcagcatctgtctgcctgcgtgctcatgccaaggcagcctccaagctagcccagcctggcaacatggacaggtctgccttaggacctgagcattgctaggtcactcctgagaggaccgatgccatctcctgtggtttgcctgggaaccataagagcgtacgttggggattgggcagggctacctgtaagctgcagcaaaataagaagagggtgtaagctctcacagggccttattttttttgcactgctggccaaatctgcccctgctcagaatcttacactacttcatttagtcagccccaaattttctttcattcctgcagtggttgctgttcaaaggtaattatgatcaatgagggctcaaaataaaggcattcaaacttttgcattcaaccttacagatttttctaactctttaggactccaaatgtctgtggtcagatttgtggggtaaaatcctagaaccacgccagccagcaaagcatgctgtcacttctcagactcagcagaaagaacattttcaaccacatccaacagcattgacaagatcttttccatctttgtggtctctacggaccaccagaaagacaccagaaagaagccctccttgcagtcatgccacactcaccatactgtttagagagctcaggagatcctgcacgccagccaaagggtggggctgtgtggtagccagaatcgtggccccaccagagatgtccacatcctaacccctgagacctatgaatgtgctatggcacctggtgtatggagcatacaaggatgtttctttcctttaaaacaaataagagtccacaacttacataaaagctgagttgctctgttctggggctcccactgtggaaagcctgagagatcagggatgcaaagccttttggaaaggtgagggtgcctgagtgcaaggataatgggggctgtgatggattcccatggaagtgagagaggcaagctcctcattctcccaggagaaaagcagggtgctatttcagagatgtctcttgctgccattgtgcctctagggcaaatagcaactcctaatatccccatttttagtctgggcttgtgaaaacacagcctaacacaccagcaaaatatgcaaaatacccaacctgcatctcagccagcctcaggtctgactttgcaaggggctgtgtctctgtttctgtccccaccagaatggtaggggtaacagtaaaaaagaaacctggggtcaagagacctgagttcaaattgtagccttggtacttactcactgtgttgccctgagccagttcctttactttctccaagtcttaatgttatcatttgttagattactataacctagatgttagccaagttcattctgtctttgaagatttaaataaaatttgctctgttccctactccccatcctatgggaaaacccaatgtccatccccaacatttctgagaattctgagggggttgtcttctcatgtttacttccaagtttcagctgaggctttagtcggagagatatgagcttcatatcccagcaatgcccatgacttcaagttgaacatcacacatcctctttctgaagcctcaccttgcctcctcagctctcactagcagtaacacatcttcccctgaccctgttgcccaaaccattttcttcccatttacctcctttcccatccctcccttctcagctcttccaccctctccccaaaagttgttcctttcttaagctgcaaaatctagccatctccttagtacgtctttcttaaacctgctctgagccttgcctcccaccccaagactcttctgtaggtaagttcctaaactccaacccttccttccctgaaacaaactctgatgcagctgttttaagagtaagtttccacccactatgtggagattgtattatggagcttcatgggactactggaaggatacaatgaggagagatgtgtgaatctctctctctctcccccctctctctccctctctttctccctctgtccctgtcttctttatgccttcattcacagtctgccttccttaactggacatagtatcaaagccaattatatatttttggatctttatagaatctgtttaaaggaattttataatcactgatgctgaattttaaaagcaattcaggaaacttacatttctctctttaaaataccaattcacttcacctttaggtggcctgggattgatttcttcactctgggtcgcaggggccttaataaataaagtcctttatttctaacgtgatgatattacttggcctttccattttatcaaagtatttttaataaaagaaaggcataactaaggtgcactgaaatatgctctaaaaatgtttattccaaaaatagacccatatgctagttttcattcaactcatcggagcatgtttattccagtgataacaagctttctgattccatcagcaagaaaaagacgtttaatgcgtgaggctacctctgcatttgttatatatcacacgtgaacttgcaccccccaaggacatcttttcatggcccaaacagccatggagagcactaggtggaataatgtatggcagctgttccagggctatccacacaggcttcacaacctttgcttggtttaacttgttctgacaaaagacaacaaaagtcccctctgtttttttggaagaagcatgattatttctaaatcattaacaacaactggactgacttcctctccccggtgtgttcatcgccactacctgtatgtatctgcagtggcaaagccctcccttcaggcagtatcacctttcaccctcagaccactggaaaagaaagggtaggagagagtacttactaggcaatgaagtggaaaaagtcagttggtctagactcttggctgaagaatttgaatctattcttggatcagccaacttcaaaagttttacatctaaggaagaaaatgtcaaggttgcattcagggtaagtgtggcctttaggtcagctacgtcctcgtgatcttaaagaggcaagtaggcttcctagaattcccatttcctgagccttaagaaaccataagctttccctccccaggagttgtataaatcgcagatgcttacgtgcttatatgaaaagtctggctcctccactcacagatgtgatctctgttccatgtctatgtgagccagggagccgagctcagtttcttgctggtttctgcaagaaatacatgcacagtatgcattttacatgctattatgagtttatggcatatttcagagtttaggagcagggttatgtgacacactgagttgccttttatacctcactgcttctacagtgatctcaaccttcctcttttatcttctgggtcattcagctcatcggagcaacccacagatctctgtattttgacatgcagtatcccatatctaggatgctactcatcttcacagctaccccaagctggctgatccagaatttccacacgggcagtcctttgagtattatcctaaagagaaattttcataaaagctactaagtggaggaaaaaaatcatctatttatccatcttggtttgaggaaccctcccccatactgcctaataatcacagcttacattaattgagtacttgctagatacagatccctatgctaagtagacattaaaattcacagccactcataacaaactggagaagctaagagatgtagccaagccattcaaactagaaagtgatagagccacgatttgaatccagggagcttcaagaagaaaccccaatgcattttcgcaccttttgctacacaacataagcaaaccaaaatggtagcatccattcaggtgcagctacagcacttgaacaccaggacagtcttgagctaaaccacagaggatgtttcttattgatgagagtcatttctgagccccaaagggtcagtgggaagagaaaacatggcccccctgctttctttctcttatttcccatggctagaatatatgcagtgtcccgggctgcagagagaccctgatgatccctggcagctcaaacaccacatttgccagcacatcaccctgctgaattcacccattctgctgctgctgtagtctcacaaattagggcatccaagtgaaaggatgactctgatttaggattagaaaagcctgcaaccttccccagccctctgggcattatgagagagtgacccagaaaatcgaatgcagagaagtgtcccgaaatataggagtcttgtttgaggcgtagtagaatctatcagcttgagaaattggtctggaaatcttattaaaagagacaaatcattccacattctctccagactgaagatattggggataataggacttccctgataccttggatccatgcaccttgtgtcaggatcacagccaaactctaggaaccctaaattcagtgcaggtgataaaggcaattattttttttaatgggcagttctgattaattctggtttctctgaccaaccatagacttatttgtaccaatctctcattactgtgaaggttgcaaggcggaagagccaatggcaaagagaaatgaagttcaaattgtggatttgtcatcattgcacagctcagcagatggttgtccagccatggaggcccgtgaccagcgcccgacaagacacacacacacacacacacactcacacacactcagagctcctttctcactatgcttggttaacccccagtggagacgccaggaaagcaaggcatcattgcgttctgaagcttaaccttgcatacttatgctatttatgaggggcgataagaagaatccttcaaatttatatatcatagctattactattattatttttgttgagcactgatggattcaacaatggtatgaatcactggaatttagtaaatgcttattccatgcctggcactgtggtaagggtttatttacatgaattatgtcctttatcctcagaacaaccctataaagtaggggttgccaaactttttctgtaaagagccagataggaaatatttcaggttttgcaggctatatggtctttgttacaactacccaactctgtgggtgatgcatgaaagcaactgtggacaatacataaatgaataagtgtagctgtgtttcagcaaagctttatatgcaaaaataggcagctggctgggttggcttgtgggcaatagtatgccaactgctgctataaggtgaatattcctaagctagaacttggggtttccacagctaagaaggtgggagacatgagtttccatctcctacatccttcctgctcgctgctcttcccttctaattctagttctggaggaaggagagaatgaaggtattttcacatgtgacttctcagggtgagatggctgttcttcggccacgaagtggagagcaagcacccccttcgatgaaaaccctgcatctgtagggggtgggtcacttctgtccatctagccccctatttgcaagcctggggtagcctgaaccagacccccgctgaggagagactcaatcccaaactgctctcagaagcctcggtgggtctttctttgtgaatcttggctatatcttcagggtaacccccagatgaagggtctaacacatgacttctttgttcatgttggggtggtccccagcgagcctgcagccgcaatcttgtctcccctctgtaccccagcaatgggacctgtagacctaggcaggatccatcttgtgccccttgggaaccaggaactggagggagcatgccttgctcctctctgcagccacacaccccaccccccacctcaacattctctcctcagctaaagttatctagtggcttaacagagacaaagatacaagaaacaagatatccatctcttcttcttcttctatttttttttttttttttttttttgaaatggagtcttgctctgtttcccaggttggagtacagtggcgtgatctccacccactacaacctctgccccctgggttcaagtgattctcctgcctcagcctcctgagtagctgggattacaggtgcccaccaccatacccggctaatttttgtatttttagtggagacgggtttcaccatcttggccaagctggtctcgaactcctgacctcacgatccacccaccttggcctcccaaagtgctgggattacaggcgtaagccaccgcacccagcctccatctcttcttctcaatgacccctgaagcttaaagaataatttatggccaggtgcagtggctcacacctgtaatcccggcactttgggaggccaaggtgggtggatcacgaggtcaggagatcaagaccatcctggctaacacggtgaggctctgtctctactaaaaacacaaaataaaaataaaaaaaataaaatagccgggtgtgatggcacatgcctgtagtcacaactacttgggaggctgaggcaggagaaccacttgaacccgggaggcagaggttgcagcaagccaagatcgcaccactgcactcccgcctaggtaacagagtgagactccgtctcaaaaataataataataataattataatgattttatactaggttttctcagtctctgcactatggatatttggggccacataactctcggggggagctaatctgtgcactgcaggatgttgagtagcatcctctcctctactcactaaatgcccatagcaacccgcaggtgtgacaatcaaaatgtcttcagacattgcccagatgccctctgggaaacaaaacagtctcagactgagaaccactgtcttaaacagaaggtcaatcactgccttttgctctcagctgtaggttctaatttccaattccagataaatagaaagaatcataggcaagatctgtcagcaccatgtgacattaacttttggtgcaaagtaagcataattatccccactttacctatgagaaaactgaggcctgggctgcacagctagtgagcacctgagaccagatttggacccaaggccgcctgaggtcaaacccatatatatatatatatatattttttttttttttttgagatggagtctcgctgtgtcacccaggctggagtgcagtggcgcgatctcagctcactgcaagctccgcctcccgaaacccctatattttttacactacttctgatctgatcatgaatgaacactatgaaggttttcctggaatgaggaagagcttgtgatgatttgcgtggtgaaaagaaaactagatggtacttgccctttctttagcatgttctatctaatcctgacagcggggcttagaggtagatattattctccccattttacagatgaggaaactcaggttaagcaaacctaacaaatggtttgaaatcaacatagcaaagatttgcaagcccagtgtttctgtgctcaaagccttgatatttcaacaccagaaaaagtggatggctgctccctaaaggggaaactgagtctaatttcctacataatactctacctttctggccaatgtgtccttccagccataaaaaaagcttggtgacggctgggcacagtggctcacacctataatcctagcactctgggaggctgggacaggtggatcacccgaggtcaggagttcaagactagcctggccaacacggcgaaaccccatctttactaaaaatagccagacatggtggcaggtgcctataatcccagctacttgggaggctgaggcaggagaatcacttgaacctgggaggcagaggttgcagtgagccaaaatcgtgccaatgcactccaggctgggcaacaagagtgatgctccatctcaaaaaaaaaaaagaaaaagaaaaaaagaaaagaaaagcttgttgataaatgagactttgatacccgccccctgcctttgacctccttctgtgacctctttccttatctcagttctgtatgcagtactggcctgagaagacctccgggtgctatgggcccatccaggtggagttcgtctccgcagacatcgacgaggacatcatccacagaatattccgcatctgtaacatggcccgggtaagtacacggccgccattgcttgctgagcccctcctccccaagacagatggaggctgccgagagaggatcccgctgagccagccaagagtctgtgttgtgctctcctgataatttcttccttgaggaagtgatgcctgtgctgattccggctccagactcagcaatgactccaacacatagagatgcaacgagcgacatccaacctgccatctgcctgtttcctgacacacttgctgccgtgtagacaaaacttcttagacattagctcttccccactgtgtctctgtactggcatgagttgatgcagcctttgattggatcccataagctttgggccaggcactgccaacacctagatgaaaagtgattacttacttccatgaggatgttcactggctgagcagagtagtgggtgggaggggcagattagcaatctatgaaatggttgctaactaatgcagctttggtcactacttggggcccaggatgaaaggagctcagcacctcccctacccccctgctcagagttcactgtccactgagacagtgagacatgttctggcacatgagcctcagggagaaaaaactctgcccaacagagtcagggaaggctttcctaaagaaagggacatttaaattgggttttgaaggctgagcaggagtttttcaggtacaaaagggggttcagggcagtcacggcaagagaatctgtgtacacgaaggaatagaagtagtcatggggactctccccgtgaggacatggcttagatcccatttggtctgtcttccaccatgatgctgcagtccccggggtatctgcaaggtgcatgtacgcaagcatccccagcagaacagccctaacagcctctctgttctcagccacaggatggttatcgtatagtccagcacctccagtacattggctggcctgcctaccgggacacgcccccctccaagcgctctctgctcaaagtggtccgacgactggagaagtggcaggagcagtatgacgggagggagggacgtactgtggtccactgcctgtgagtactagggaggtgtcaccagggcaatagggtggtgggtgatagagcatccttgcagatgctgctggccacataccccagtcctaggcaggcctggctataccacaactcaacatccctcaaaggctagtggcagtacattcaaaggaattatgatcctttaatggaacggggctgccagtttgttgtcctgaactaatatatgacatattattgatgcaaaacctagtggtctttccacaaacatgagaggaggttgcctgcttctctacaatgggcttaaagggatcataggacaaaaagagcatgagggaaaggcactgccctcaggggctgatagatggatgtgaaggactctaggaacactattgtgcaggggcacagtgagctccagaccagctgtgtttatacccccattgctggggtgaactggagactttacctcctgtcttcgaatggacattgtccagtctaatgaattctggtgtcattacgctgggtggaggtcaggacctcgagaggacagtggctgacaagctgtgcaacgtcaagaaaatcactgaattttataagcctgagtttcctcgtctgttcattgggtatgtggaattagacaatcttcagaccttatagtgctttggcatgaaatagaaagtgaacacactttatctgccaacatagagaccaagaatgtcatggtagcaaatatgcaaacgtaaatgtaattacttaaaagagcaagtgtcacagaatctatcctgggagtatagagtgaccacagaggattctacaaagtctcacacccaaaacaaatctgcagccataacagctatgtgtgaaatatttgattcacactcactttgcttcttagaacttcaacgatttgaggaaaagtcattgagaaggcctctctcttttaaaatgttatgttaaaggaaatttgaacgaaggtcttctctttcttacaacaaatatttctggagctagtggaggcactgataacatctgactgacctcagaattgaggtcagtcttttcaaaaccagctaattattctccctctcaaacaggtggtgcatgcacatgttaggcaagtcaaagagcttaaaggaggttaaacacacagacacatagagatgcacacacagagcttcagggccaccacctgcagcaaaaattcttctccagaggaagcaaacctcaggctagagttcaggaagatgctgcgtagtgtcccaagtcaggctgatgggtgacatcagccaagcccagctggctctgcccacatcccagaaactagcagctggtttcctgccagctaatagctgctgcctccagatgcccagatgcctcccacacattcaggtgaccttaccttagcacccatctttcagggtctcacaccaccaggccctgagaccctgtgtctactcacctcttccttttggacgctgttattcttgcttcagaaatgatagaaccgtctttcataggagacctttctctcctctctctctctctcatgtttgttttttagcctgcttttttttttttttttttttgcactagtgtctttttatctatgtcctttccagccaaggtggccagtagtttgagccaaaggaaggtacaggggcattcttttaccaacagggaacttggtttccttgagggccacagacaccataacagaccttgaaatgcaggcaccagtcagtgaatggaaagcaactctctgtacttgaaacatctggtcactgcatgtcctgtagataaaacatctgggagattgactgagtgccttagtttctgtccagatgttctttagacacagaccattacatgaaatcattagttgctcttggcaacacgcccaggagttctgaatcaggcatattcctacagggactgtctgtaaagagtttgaagggtgtttccatgaagatgatttatggagtttcagaaaggagtaacagagacacagttctgccaccaaccctgtatccctagactcaagatcagtagcatcttgcttaaaccaaagtgtatagtagagacctgtcattttaagataaagcctatcaggcccagttcctccctccaagttcctacctccaagcttgggctggctgaccctaggctaacagagcattgctgtccttagtggaggatgggaagaactagtaggaaaatcacttggaaattttcattgtctttattggatgtttaagtggacccagagcattcttttggacatggatgcaagcatcagcaaggatgcaggtgtcacatgtacaaagacacagtaccatcctgcccttggggtttgggtgagtgtgccctgagtgactgtaacatgctcatagaaccaagaaaacatcaagctaattgaactctcaaaggtcatctagtccaaccccttcattatacaagtggggaacttggggcccagacagaggaagtgacttggccaaggtcaaagcaagttaatggcacagatgggactcaaaccataactcatggctcaggctaaagccttcaccattgccttgccttgcatctgcccagacagctgatccctactcctactgatgtagctttagaatcatcaggtgcctggaagggacctaggaacatggctcacctctttgctctgtgtttagaaatgggggaggccgtagtggaaccttctgtgccatctgcagtgtgtgtgagatgatccagcagcaaaacatcattgacgtgttccacatcgtgaaaacactgcgtaacaacaaatccaacatggtggagaccctggtgagtatcccaaggactgttctccaacagccagggctgactagttcccttgacctggagaaaatgacatcaaatagtaacatcactcaacacctggctgctaattgtatacctgcattctgtgcccttggtatgcactgttgtctgtcctgtgtcttccccttccaacctccccaacttttctttcttgcaggaaaatccaattactaatcctggtacacctactttgcttcactttctgcccattccttaagacagtgtcattaattcaggcctaaaggaaaggatgctggattagtagaatgtgaagtatgttttcaattcagtccaattatattccaattaatttatggtaatttttacaatagagagcatttatagtagagagtactatggaggaaagtgtgataaagagagtgtgtgggcagagccccgggtgataagacctggtaccatggtggaccaccgcaccatgcacgaggagctttaatataagtctttaaacctactcgaatagtggtcttagtcaaaatgaggccatattaacgtgtgggtcacagaccagcagcagcatcattatctgggagcttgttagaaatgcagaatcttgagccccactccagatttactgaatcagaatgtgcattttaaaaagatttctggctgccttgtatgcacgttacagtttgagaagccctgttgtacaaaacagtaaaaaagaaagggaatgatgccagctgggcattcgaggaagcttgggtagaagcaggcatcaagcagaattttgaaggatgtccagatatgggtaattttgagttgacataatatggatatagaaaaagttttctccaaaatctgtatctctaaactaaatgcattttccctttcctttttcatctctctcgtctcctcttctccctctctgcctctgctcctctccgcctctcaggaacagtataaatttgtatacgaggtggcactggaatatttaagctccttttagctcaatgggatggggaacctgccggagtccagaggctgctgtgaccaagcccccttttgtgtgaatggcagtaactgggctcaggagctctgaggtggcaccctgcctgactccaaggagaagactggtggccctgtgttccacggggggctctgcaccttctgaggggtctcctgttgccgtgggagatgctgctccaaaaggcccaggcttccttttcaacctaaccagccacagccaagggcccaagcagaagtacacccacaagcaaggccttggatttctggctcccagaccacctgcttttgttctgagtttgtggatctcttggcaagccaactgtgcaggtgctggggagtgggaggctcccctgccctccttctccttaggagtggaggagatgtgtgttctgctcctctacgtcatggaaaagattgaggctcttgggggtcactgctctgctgccccctgcaacctccttcaggggcctctggcaccagacatttgcagtctggaccagtgtgaccttacgatgttccctaggccacaagagaggccccccatcctcacacctaacctgcatggggcttcgcccacaaccattctgtaccccttccccagcctgggccttgaccgtccagcattcactggccggccagctgtgtccacagcagtttttgataaaggtgttctttgcttttttgtgtggtcagtgggagggggtggaactgcagggaacttctctgctcctccttgtctttgtaaaaagggaccacctccctggggcagggcttgggctgacctgtaggatgtaacccctgtgtttctttggtggtagctttctttggaagagacaaacaagataagatttgattattttccaaagtgtatgtgaaaagaaactttcttttggagggtgtaaaatcttagtctcttatgtcaaaaagaagggggcgggggagtttgagtatgtacctctaagacaaatctctcgggccttttattttttcctggcaatgtccttaaaagctcccaccctgggacagcatgccactgagcaaggagagatgggtgagcctgaagatggtccctttggtttctggggcaaatagagcaccagctttgtgcataatttggatgtccaaatttgaactccttcctaaagaaacccagcagccaccttgaaaaaggccattgtggagcccattatactttgatttaaaataggccaagagaatcaggcctggagatctagggtcttgtccaaagtgtgagtgagtcaatgagagggaaccaacatttgctaagtctctactgtatgccagggatcatgcttggcactttccataggacatttcacacagtccttagaacccccaggagagagctactgacttgttatcatctccatttgatcatctcctccaatgaggaaacccacgcaccttccttagtaatgaaatcctgggttccaaaggggcaggtaatggcaatgagacttctccgtgctgttttcttcatcttctctaagccaagcaattattttatggagggaaaataaggccagaaacttctgagcagataactccacaaatggaaatttagtactttcttcctgatgccagttcttctgggaagcgcagaatttcagatatattttagtaacacattcccagctccccaggaaagccagtctcatctaatttcttagtcagtaaaaacaattccctgttccttcaggctatgaatggaccagccagggaaactctcgaccttgatctctagccagtgcttaggcccaatatctgacagcctcaggtgggctgggacctaggaagctccatcttgaaggctggtctagccccagacagggcatgaggggcagagaattcaagaaggtacagctttggccctcaagagcccactgtatgctggggaaatggaaccatggtgcagtagtgtggagtggatgagtgttccatgagcctaggagcaagaaagtctcttcggcctcgggcttcctggagaaggggacgtccattcctgctgggtcttaacaagcataaaaaggaaaaaaaggaaactcaggcaaagggatccatatgtgcaatggcaaagaaatgtgaaaaggcattgggagaagcagtctgggggaggccagcccagtgcgggcacagcacaacacggggagcagcaagagatgagccagggtccaggagacagatgcccatcgcgagtacagactttgtcctattggcaacaaggagtccatggagctttagagagatgcactcagcttcgtgttggccaagactccttctgggccaatggggctgcctcttttcctttcatcagacactgtgaaaacattcccttaagcgtgcactttttaatatcacatctatttgtctgtctgctcattgttttgttgctggaactaaatatgcaatggatcatgagactcagattctatgagaaacccagggtctctgctttaccacggagcagggtcaccaacccagatctccaggcccatgaggatggaacatgaaaggagccgacaaaagttgcttccattggcatgggctctggagctgtccagaagtccagggacaccagacttgatcaaggaagggctgtcactttagaggttcaaaaggaagtgcctcaaagcaaaggcaagcaaaggaaccccacgatgaacttgctcttttcctttgatgagcctctccccaggtgtatttcagcagaccccggggacccacccccactgggcctgctggcctccctcggctccagcccaatgccccagctggccttccccagcctgcaaggagcctgtagcatggcaaatctgcctgctgtatgctattttcttagatcttggtacatccagacaggatgagggtggagggagagctatttaacacaaatcctaagatttttttctgctcaggaaggggtgaaatagctggcagatacaaaagacagtggcttttatcattttaaatggtaggaatttaaagtgtgacttcagggagaaacaaacttgcaaaaaaaaaaaaaaaatctcaggccatgttggggtaacccagcaagggccagtgatgatttcccccagctcatccccttattttcccacaacccaaccattctctaaagcagggcagtgaataggtcttaggccagtgcacacaggaagaaattgaggcttatggatggggatgacttccctaagatcccatgggacaaggatgtggcaaggcttggatgagatggggcaccggtgcccaggaatttgaacattttcctttacccaggaaatctccggagccaacaccaccacccccagggggtctccccaccccaccccatttacagggtgagctcagcctgtcatgagcagaggaaaatattattaatgctctctgagtctttacaacaggagctcttacctcatagatgtgggctctgtttggggaagatgcaaggaagtaatgagaagcccaggaaatttctccacctgtgtttatggcctaaatagcttcaggatgtatcttagctgcactccaacattgcatcctttctggggtgaagaatctgggccaaccaggggtccttgggcctctagaaggccacagtaggcctctctttgtgggaatggaaggggacagtttgcttttagtgctggccctctctgtgggtgtggcctgcaaaggaaccaacagaccctatgctggggactctaacatgtgagctcattaaattcttccagcattctaaaggagggtttgtgattgtcaccatttactgatgaggaaactaaggctcctaggggagaaatcacttgcccacagttccacagctagtgagtgaatgaaccaggatttaaaccggttttttctcactacagagacaatatttttccaccattgtatctcacatttttcccaggaggttacccataacagaagagactagagtggaacagatacgtcagtggataaagctcaaagcaaacaacagtaagcttaaaattccttcatagtctcatgttttacgttcacaattcatgcaaaatttgcattccactttctgatttagccttgttggttttaatatgactctatgaatatttcaaaaaaaaatgtgctctgttcctcatgttgttctgttctgttcaccccgctatgacggaccctaggtcagctggtcttcagcttgaccctagaattgactctaggagcagtgaccctgctgcctcccagagccagttataggctcaagatcaagaccaactgaccttctcctaggcagctcctttggtgtgtgggtgctctgacctcactgttcatgaggggacctcaactaaggcatcttccagttgggtgctggaaggaacccattaactcacactagaatgatgaggatttgctcatctggcgtggagaaggatgagcccacaaaaccctaaagggaaaagagaagctggacacagctgtactcagcagattcctgaatgctaggctggaaagtggtgcctgttgtccaagtggagtcacatggttgctaatgtgggcaagtctgaggacacacttcatgagcagctggggtctggaaggctcctcactttaccctagccacacataattactgggtgcctacagcacctagcaccttggagggggcactattaggaaatcgagattactatggcacaattaattcctgggtaaggcatggggttgtggtggacagagctcagtctttagtttgaacgaaaacatacatacatgaaaaacatacatgaaaaaaggaccctcatcaacattagaaggggtagatttggagcactttaggcaggaaaacaggaacgcaaggccaggaaactggaacccagtgaatactcagaaccgaggatgcagatgacttatttagcaaaatggtcacttctgtgacatagctggagaaaggatgggtaacagcttgccagagccacttggaacaagggcaaatctcagtgtctggggcaaaagatgatgcatttccctctgacccatcatgtttattcatcctccactccccattgccacactagctcttgctgtaagtcctcaccaggatctacatttcctcgtcgctggtgggaaccccttagagtacatagaggtatcagtccagtaagactgctctacacaacagaagtgaggcccagggagtagcagccaggcccttatcctgttacctctgcaggagtgactgcccaacccagatccagagacattgaaggaaatgataattccttggtacctcactgccttgggacaaaatgaagaaagccacccttccttaggctgcagcttgccactcctgggctgggtaaacaggtcatcagcaccaggctcaaccaggagtaacactctggaagacatgggtgagcccaagaggaagcatgaacaggacgctgttcctaagtcatgtcaacaggttgtgctgggccaggatccccagggaaaaaaatggtcaacccaactggagggtaggttagaagaaaaaaaacataaacgtggatagtcatgtcatctcaaatccctgacttggcttccccattacttaacagtctgagctccttcttagcctgtgaccagcttcaaatcacagccaagtaaaacaaggaaataggaaaagtaaatccaactagaagagacaagctgagattcagatttgtttactcctcccatgcaaagtttccctgttggaggttttccatgtatacatgtctagaagtgatagaatgcaaggccttggctttgtcttgcagggatctgcctttgaggtcatagactgaacagcagggagagaggttagtggtggagtgtggggggagctgttctagctccagtttcttctgacacatttttcaggatcatggatctgatcctccgaagcacagcagagatatctaagccatatttgtgcacatgagcagactcttctagttttttagtaaccagggatgggcttttgcatggcactgactatagagatgtcttgtagagatcaagccagtcttttgcatcccacctgcccacctccagaagagatgggaaaaggtcatcaaagggcattcaccaactgaaatccactcatgaatgttaggtctctaaaaggaggcatcaacactcacaatggtagcctccaaacctagcatcccacctatctaagagctcaggggtggtccactggggcagatacaagggaagtgcaagggctcaggatgaaagaaaatctattgggaagagttttaggggcttgatcattatggggcttccttctatatctgagaactgctctgggtggtgagatgtggactctgatccttaattggaatgttcggagaatgagtgtctggtggccttgaagtgttggacagaaaagtatcagtataaaagcctggagctcagggtaattaatgtagttcatggttccttagtgagcaggactcttggatgtggaggagaaagggtcataggaagtaaaccaccaaaattacaaaattgagtctctgtacaattacttcagtgcctttgggcttatgaatacaaatcagtgggccttctctatgatggtccaacaaactctcagtgtccaccctgtccctgtatctcccatggaagatgaataatgtcaggtgttctttgggtcaaaggccccagggcagtctggaggcttagagggcagagtggtgtcattccatgtaaagttaggcttctgaggggtcaggcagaatatggtgtccatatcttccatagctctgcagattcttggatgaagtcaagcacagtttgctagacccaggtcactcctctgagtataactaggacccatgagtgaaacttaatagctgtaaggaagaacctgctgtctgccagagaggataagctgcccatctcagcagctgtctaaaagaaggcaggtgtctctttaaagggaagagaagcattggtgaaatggatttcaggtcacttccattccagatgggtgagatcttgtggagctgggatcatgtttgaactcattcatacctgtagagcacgaatccaagtagattgtgtttggtctgtacaggctgaagccccctgctctcccacccaagtgcccccactgagcaggccaacatgctgttgtggccacatatactgggctgatccaggctggttatcaccaaacagcaaaccatagggaacagctgctttgccatagacccaatacccatgtagatctctcatgagagcagccataactcagacccactgaccaacagggccatgagtgacagccagaaccagtgaaggtccaagtaggacacagagcagggcttttcttaccatacacattatctccagaggttatttctaccccactccctattcaaggcctgttggagcacactgcaaaagcaaaagcacagtaactcaatttacacatgattataatcatttccagtgcacacatttcatcaccaggtggatcctgagctagcccatgtaaatccgggttaacccatattggtaatcatactcaaaagcacttttcaccctacattctactagccaatcaaagacaaagagttgtggcctctaccattgccttggcttctggacaccctcacaagctatcccaaggttcccgctcaactccagggaggctgacatcttcacatccactgggcatataatattgcatgagaccaaagtctccacactctttgcagcctcctccatgaatcccaatggcctgcacttgtacagtttgggtgtttgatagataaagcacgtatgagaagagaaaacaaaataaatcaactttttaaaaaagccagcactgtgctgtcaatgttttttttttcttttcaattctagctcagaaaagcagaaggtaaataatgtcaggtcaatgaatatcagatatattttttgactgtacattacagtgaagtgtaatctttttacacctgcaagtccatcttatttattcttgtaaatgttccctgacaatgtttgtaatatggctgtgttaaaaaatctatacaataaagctgtgaccctgagattcatgttttcctaagata

SEQ ID NO: 129 - DNA, 12466 bp, Homo Sapiens
atgtatttacccatatctcttttgtctacaggtggctgttcctttgatgagcactacagcaactgtggttatagtgtggctctagggaccaatgggttcacctgggagcagattaacacatgggagaaaccaatgctggaccaggcagtgcccacaggatctttcatgatggtgaacagctctgggagagcctctggccagaaggcccaccttctcctgccaaccctgaaggagaatgacacccactgcatcgacttccattactacttctccagccgtgacaggtccagcccaggggccttgaacgtctacgtgaaggtgaatggtggcccccaagggaaccctgtgtggaatgtgtccggggtcgtcactgagggctgggtgaaggcagagctcgccatcagcactttctggccacatttctatcaggtgatatttgaatccgtctcattgaagggtcatcctggctacatcgccgtggacgaggtccgggtccttgctcatccatgcagaaaagcacctcattttctgcgactccaaaacgtggaggtgaatgtggggcagaatgccacatttcagtgcattgctggtgggaagtggtctcagcatgacaagctttggctccagcaatggaatggcagggacacggccctgatggtcacccgtgtggtcaaccacaggcgcttctcagccacagtcagtgtggcagacactgcccagcggagcgtcagcaagtaccgctgtgtgatccgctctgatggtgggtctggtgtgtccaactacgcggagctgatcgtgaaagagcctcccacgcccattgctcccccagagctgctggctgtgggggccacatacctgtggatcaagccaaatgccaactccatcatcggggatggccccatcatcctgaaggaagtggaatatcgcaccaccacaggcacgtgggcagagacccacatagtcgactctcccaactataagctgtggcatctggaccccgatgttgagtatgagatccgagtgctcctcacacgaccaggtgaggggggtacgggaccgccagggcctcccctcaccaccaggaccaagtgtgcagatccggtacatggcccacagaacgtggaaatcgtagacatcagagcccggcagctgaccctgcagtgggagcccttcggctacgcggtgacccgctgccatagctacaacctcaccgtgcagtaccagtatgtgttcaaccagcagcagtacgaggccgaggaggtcatccagacctcctcccactacaccctgcgaggcctgcgccccttcatgaccatccggctgcgactcttgctgtctaaccccgagggccgaatggagagcgaggagctggtggtgcagactgaggaagacgttccaggagctgttcctctagaatccatccaaggggggccctttgaggagaagatctacatccagtggaaacctcccaatgagaccaatggggtcatcacgctctacgagatcaactacaaggctgtcggctcgctggacccaagtgctgacctctcgagccagagggggaaagtgttcaagctccggaatgaaacccaccacctctttgtgggtctgtacccagggaccacctattccttcaccatcaaggccagcacagcaaagggctttgggccccctgtcaccactcggattgccaccaaaatttcagctccatccatgcctgagtacgacacagacaccccattgaatgagacagacacgaccatcacagtgatgctgaaacccgctcagtcccggggagctcctgtcagtgtttatcagctggttgtcaaggaggagcgacttcagaagtcacggagggcagctgacattattgagtgcttttcggtgcccgtgagctatcggaatgcctccagcctcgattctctacactactttgctgctgagttgaagcctgccaacctgcctgtcacccagccatttacagtgggtgacaataagacatacaatggctactggaaccctcctctctctcccctgaaaagctacagcatctacttccaggcactcagcaaagccaatggagagaccaaaatcaactgtgttcgtctggctacaaaagcaccaatgggcagcgcccaggtgaccccggggactccactctgcctcctcaccacaggtgcctccacccagaattctaacactgtggagccagagaagcaggtggacaacaccgtgaagatggctggcgtgatcgctggcctcctcatgttcatcatcattctcctgggcgtgatgctcaccatcaaaaggagaagaaatgcttattcctactcctattacttgtcccaaaggaagctggccaagaagcagaaggagacccagagtggagcccagagggagatggggcctgtggcctctgccgacaaacccaccaccaagctcagcgccagccgcaatgatgaaggcttctcttctagttctcaggacgtcaacggattcacagatggcagccgcggggagctttcccagcccaccctcacgatccagactcatccctaccgcacctgtgaccctgtggagatgagctacccccgggaccagttccaacccgccatccgggtggctgacttgctgcagcacatcacgcagatgaagagaggccagggctacgggttcaaggaggaatacgaggccttaccagaggggcagacagcttcgtgggacacagccaaggaggatgaaaaccgcaataagaatcgatatgggaacatcatatcctacgaccattcccgggtgaggctgctggtgctggatggagacccgcactctgactacatcaatgccaactacattgacggataccatcgacctcggcactacattgcgactcaaggtccgatgcaggagactgtaaaggacttttggagaatgatctggcaggagaactccgccagcatcgtcatggtcacaaacctggtggaagtgggcagggtgaaatgtgtgcgatactggccagatgacacggaggtctacggagacattaaagtcaccctgattgaaacagagcccctggcagaatacgtcatacgcaccttcacagtccagaagaaaggctaccatgagatccgggagctccgcctcttccacttcaccagctggcctgaccacggcgttccctgctatgccactggccttctgggcttcgtccgccaggtcaagttcctcaaccccccggaagctgggcccatagtggtccactgcagtgctggggctgggcggactggctgcttcattgccattgacaccatgcttgacatggccgagaatgaaggggtggtggacatcttcaactgcgtgcgtgagctccgggcccaaagggtcaacctggtacagacagaggagcaatatgtgtttgtgcacgatgccatcctggaagcgtgcctctgtggcaacactgccatccctgtgtgtgagttccgttctctctactacaatatcagcaggctggacccccagacaaactccagccaaatcaaagatgaatttcagaccctcaacattgtgacaccccgtgtgcggcccgaggactgcagcattgggctcctgccccggaaccatgataagaatcgaagtatggacgtgctgcctctggaccgctgcctgcccttccttatctcagtggacggagaatccagcaattacatcaacgcagcactgatggatagccacaagcagcctgccgccttcgtggtcacccagcaccctctacccaacaccgtggcagacttctggaggctggtgttcgattacaactgctcctctgtggtgatgctgaatgagatggacactgcccagttctgtatgcagtactggcctgagaagacctccgggtgctatgggcccatccaggtggagttcgtctccgcagacatcgacgaggacatcatccacagaatattccgcatctgtaacatggcccggccacaggatggttatcgtatagtccagcacctccagtacattggctggcctgcctaccgggacacgcccccctccaagcgctctctgctcaaagtggtccgacgactggagaagtggcaggagcagtatgacgggagggagggacgtactgtggtccactgcctaaatgggggaggccgtagtggaaccttctgtgccatctgcagtgtgtgtgagatgatccagcagcaaaacatcattgacgtgttccacatcgtgaaaacactgcgtaacaacaaatccaacatggtggagaccctggaacagtataaatttgtatacgaggtggcactggaatatttaagctccttttagctcaatgggatggggaacctgccggagtccagaggctgctgtgaccaagcccccttttgtgtgaatggcagtaactgggctcaggagctctgaggtggcaccctgcctgactccaaggagaagactggtggccctgtgttccacggggggctctgcaccttctgaggggtctcctgttgccgtgggagatgctgctccaaaaggcccaggcttccttttcaacctaaccagccacagccaagggcccaagcagaagtacacccacaagcaaggccttggatttctggctcccagaccacctgcttttgttctgagtttgtggatctcttggcaagccaactgtgcaggtgctggggagtgggaggctcccctgccctccttctccttaggagtggaggagatgtgtgttctgctcctctacgtcatggaaaagattgaggctcttgggggtcactgctctgctgccccctgcaacctccttcaggggcctctggcaccagacatttgcagtctggaccagtgtgaccttacgatgttccctaggccacaagagaggccccccatcctcacacctaacctgcatggggcttcgcccacaaccattctgtaccccttccccagcctgggccttgaccgtccagcattcactggccggccagctgtgtccacagcagtttttgataaaggtgttctttgcttttttgtgtggtcagtgggagggggtggaactgcagggaacttctctgctcctccttgtctttgtaaaaagggaccacctccctggggcagggcttgggctgacctgtaggatgtaacccctgtgtttctttggtggtagctttctttggaagagacaaacaagataagatttgattattttccaaagtgtatgtgaaaagaaactttcttttggagggtgtaaaatcttagtctcttatgtcaaaaagaagggggcgggggagtttgagtatgtacctctaagacaaatctctcgggccttttattttttcctggcaatgtccttaaaagctcccaccctgggacagcatgccactgagcaaggagagatgggtgagcctgaagatggtccctttggtttctggggcaaatagagcaccagctttgtgcataatttggatgtccaaatttgaactccttcctaaagaaacccagcagccaccttgaaaaaggccattgtggagcccattatactttgatttaaaataggccaagagaatcaggcctggagatctagggtcttgtccaaagtgtgagtgagtcaatgagagggaaccaacatttgctaagtctctactgtatgccagggatcatgcttggcactttccataggacatttcacacagtccttagaacccccaggagagagctactgacttgttatcatctccatttgatcatctcctccaatgaggaaacccacgcaccttccttagtaatgaaatcctgggttccaaaggggcaggtaatggcaatgagacttctccgtgctgttttcttcatcttctctaagccaagcaattattttatggagggaaaataaggccagaaacttctgagcagataactccacaaatggaaatttagtactttcttcctgatgccagttcttctgggaagcgcagaatttcagatatattttagtaacacattcccagctccccaggaaagccagtctcatctaatttcttagtcagtaaaaacaattccctgttccttcaggctatgaatggaccagccagggaaactctcgaccttgatctctagccagtgcttaggcccaatatctgacagcctcaggtgggctgggacctaggaagctccatcttgaaggctggtctagccccagacagggcatgaggggcagagaattcaagaaggtacagctttggccctcaagagcccactgtatgctggggaaatggaaccatggtgcagtagtgtggagtggatgagtgttccatgagcctaggagcaagaaagtctcttcggcctcgggcttcctggagaaggggacgtccattcctgctgggtcttaacaagcataaaaaggaaaaaaaggaaactcaggcaaagggatccatatgtgcaatggcaaagaaatgtgaaaaggcattgggagaagcagtctgggggaggccagcccagtgcgggcacagcacaacacggggagcagcaagagatgagccagggtccaggagacagatgcccatcgcgagtacagactttgtcctattggcaacaaggagtccatggagctttagagagatgcactcagcttcgtgttggccaagactccttctgggccaatggggctgcctcttttcctttcatcagacactgtgaaaacattcccttaagcgtgcactttttaatatcacatctatttgtctgtctgctcattgttttgttgctggaactaaatatgcaatggatcatgagactcagattctatgagaaacccagggtctctgctttaccacggagcagggtcaccaacccagatctccaggcccatgaggatggaacatgaaaggagccgacaaaagttgcttccattggcatgggctctggagctgtccagaagtccagggacaccagacttgatcaaggaagggctgtcactttagaggttcaaaaggaagtgcctcaaagcaaaggcaagcaaaggaaccccacgatgaacttgctcttttcctttgatgagcctctccccaggtgtatttcagcagaccccggggacccacccccactgggcctgctggcctccctcggctccagcccaatgccccagctggccttccccagcctgcaaggagcctgtagcatggcaaatctgcctgctgtatgctattttcttagatcttggtacatccagacaggatgagggtggagggagagctatttaacacaaatcctaagatttttttctgctcaggaaggggtgaaatagctggcagatacaaaagacagtggcttttatcattttaaatggtaggaatttaaagtgtgacttcagggagaaacaaacttgcaaaaaaaaaaaaaaaatctcaggccatgttggggtaacccagcaagggccagtgatgatttcccccagctcatccccttattttcccacaacccaaccattctctaaagcagggcagtgaataggtcttaggccagtgcacacaggaagaaattgaggcttatggatggggatgacttccctaagatcccatgggacaaggatgtggcaaggcttggatgagatggggcaccggtgcccaggaatttgaacattttcctttacccaggaaatctccggagccaacaccaccacccccagggggtctccccaccccaccccatttacagggtgagctcagcctgtcatgagcagaggaaaatattattaatgctctctgagtctttacaacaggagctcttacctcatagatgtgggctctgtttggggaagatgcaaggaagtaatgagaagcccaggaaatttctccacctgtgtttatggcctaaatagcttcaggatgtatcttagctgcactccaacattgcatcctttctggggtgaagaatctgggccaaccaggggtccttgggcctctagaaggccacagtaggcctctctttgtgggaatggaaggggacagtttgcttttagtgctggccctctctgtgggtgtggcctgcaaaggaaccaacagaccctatgctggggactctaacatgtgagctcattaaattcttccagcattctaaaggagggtttgtgattgtcaccatttactgatgaggaaactaaggctcctaggggagaaatcacttgcccacagttccacagctagtgagtgaatgaaccaggatttaaaccggttttttctcactacagagacaatatttttccaccattgtatctcacatttttcccaggaggttacccataacagaagagactagagtggaacagatacgtcagtggataaagctcaaagcaaacaacagtaagcttaaaattccttcatagtctcatgttttacgttcacaattcatgcaaaatttgcattccactttctgatttagccttgttggttttaatatgactctatgaatatttcaaaaaaaaatgtgctctgttcctcatgttgttctgttctgttcaccccgctatgacggaccctaggtcagctggtcttcagcttgaccctagaattgactctaggagcagtgaccctgctgcctcccagagccagttataggctcaagatcaagaccaactgaccttctcctaggcagctcctttggtgtgtgggtgctctgacctcactgttcatgaggggacctcaactaaggcatcttccagttgggtgctggaaggaacccattaactcacactagaatgatgaggatttgctcatctggcgtggagaaggatgagcccacaaaaccctaaagggaaaagagaagctggacacagctgtactcagcagattcctgaatgctaggctggaaagtggtgcctgttgtccaagtggagtcacatggttgctaatgtgggcaagtctgaggacacacttcatgagcagctggggtctggaaggctcctcactttaccctagccacacataattactgggtgcctacagcacctagcaccttggagggggcactattaggaaatcgagattactatggcacaattaattcctgggtaaggcatggggttgtggtggacagagctcagtctttagtttgaacgaaaacatacatacatgaaaaacatacatgaaaaaaggaccctcatcaacattagaaggggtagatttggagcactttaggcaggaaaacaggaacgcaaggccaggaaactggaacccagtgaatactcagaaccgaggatgcagatgacttatttagcaaaatggtcacttctgtgacatagctggagaaaggatgggtaacagcttgccagagccacttggaacaagggcaaatctcagtgtctggggcaaaagatgatgcatttccctctgacccatcatgtttattcatcctccactccccattgccacactagctcttgctgtaagtcctcaccaggatctacatttcctcgtcgctggtgggaaccccttagagtacatagaggtatcagtccagtaagactgctctacacaacagaagtgaggcccagggagtagcagccaggcccttatcctgttacctctgcaggagtgactgcccaacccagatccagagacattgaaggaaatgataattccttggtacctcactgccttgggacaaaatgaagaaagccacccttccttaggctgcagcttgccactcctgggctgggtaaacaggtcatcagcaccaggctcaaccaggagtaacactctggaagacatgggtgagcccaagaggaagcatgaacaggacgctgttcctaagtcatgtcaacaggttgtgctgggccaggatccccagggaaaaaaatggtcaacccaactggagggtaggttagaagaaaaaaaacataaacgtggatagtcatgtcatctcaaatccctgacttggcttccccattacttaacagtctgagctccttcttagcctgtgaccagcttcaaatcacagccaagtaaaacaaggaaataggaaaagtaaatccaactagaagagacaagctgagattcagatttgtttactcctcccatgcaaagtttccctgttggaggttttccatgtatacatgtctagaagtgatagaatgcaaggccttggctttgtcttgcagggatctgcctttgaggtcatagactgaacagcagggagagaggttagtggtggagtgtggggggagctgttctagctccagtttcttctgacacatttttcaggatcatggatctgatcctccgaagcacagcagagatatctaagccatatttgtgcacatgagcagactcttctagttttttagtaaccagggatgggcttttgcatggcactgactatagagatgtcttgtagagatcaagccagtcttttgcatcccacctgcccacctccagaagagatgggaaaaggtcatcaaagggcattcaccaactgaaatccactcatgaatgttaggtctctaaaaggaggcatcaacactcacaatggtagcctccaaacctagcatcccacctatctaagagctcaggggtggtccactggggcagatacaagggaagtgcaagggctcaggatgaaagaaaatctattgggaagagttttaggggcttgatcattatggggcttccttctatatctgagaactgctctgggtggtgagatgtggactctgatccttaattggaatgttcggagaatgagtgtctggtggccttgaagtgttggacagaaaagtatcagtataaaagcctggagctcagggtaattaatgtagttcatggttccttagtgagcaggactcttggatgtggaggagaaagggtcataggaagtaaaccaccaaaattacaaaattgagtctctgtacaattacttcagtgcctttgggcttatgaatacaaatcagtgggccttctctatgatggtccaacaaactctcagtgtccaccctgtccctgtatctcccatggaagatgaataatgtcaggtgttctttgggtcaaaggccccagggcagtctggaggcttagagggcagagtggtgtcattccatgtaaagttaggcttctgaggggtcaggcagaatatggtgtccatatcttccatagctctgcagattcttggatgaagtcaagcacagtttgctagacccaggtcactcctctgagtataactaggacccatgagtgaaacttaatagctgtaaggaagaacctgctgtctgccagagaggataagctgcccatctcagcagctgtctaaaagaaggcaggtgtctctttaaagggaagagaagcattggtgaaatggatttcaggtcacttccattccagatgggtgagatcttgtggagctgggatcatgtttgaactcattcatacctgtagagcacgaatccaagtagattgtgtttggtctgtacaggctgaagccccctgctctcccacccaagtgcccccactgagcaggccaacatgctgttgtggccacatatactgggctgatccaggctggttatcaccaaacagcaaaccatagggaacagctgctttgccatagacccaatacccatgtagatctctcatgagagcagccataactcagacccactgaccaacagggccatgagtgacagccagaaccagtgaaggtccaagtaggacacagagcagggcttttcttaccatacacattatctccagaggttatttctaccccactccctattcaaggcctgttggagcacactgcaaaagcaaaagcacagtaactcaatttacacatgattataatcatttccagtgcacacatttcatcaccaggtggatcctgagctagcccatgtaaatccgggttaacccatattggtaatcatactcaaaagcacttttcaccctacattctactagccaatcaaagacaaagagttgtggcctctaccattgccttggcttctggacaccctcacaagctatcccaaggttcccgctcaactccagggaggctgacatcttcacatccactgggcatataatattgcatgagaccaaagtctccacactctttgcagcctcctccatgaatcccaatggcctgcacttgtacagtttgggtgtttgatagataaagcacgtatgagaagagaaaacaaaataaatcaactttttaaaaaagccagcactgtgctgtcaatgttttttttttcttttcaattctagctcagaaaagcagaaggtaaataatgtcaggtcaatgaatatcagatatattttttgactgtacattacagtgaagtgtaatctttttacacctgcaagtccatcttatttattcttgtaaatgttccctgacaatgtttgtaatatggctgtgttaaaaaatctatacaataaagctgtgaccctgagattcatgttttcctaagata

SEQ ID NO: 130 - protein, 1444 aa, Homo Sapiens
MYLPISLLSTGGCSFDEHYSNCGYSVALGTNGFTWEQINTWEKPMLDQAVPTGSFMMVNSSGRASGQKAHLLLPTLKENDTHCIDFHYYFSSRDRSSPGALNVYVKVNGGPQGNPVWNVSGVVTEGWVKAELAISTFWPHFYQVIFESVSLKGHPGYIAVDEVRVLAHPCRKAPHFLRLQNVEVNVGQNATFQCIAGGKWSQHDKLWLQQWNGRDTALMVTRVVNHRRFSATVSVADTAQRSVSKYRCVIRSDGGSGVSNYAELIVKEPPTPIAPPELLAVGATYLWIKPNANSIIGDGPIILKEVEYRTTTGTWAETHIVDSPNYKLWHLDPDVEYEIRVLLTRPGEGGTGPPGPPLTTRTKCADPVHGPQNVEIVDIRARQLTLQWEPFGYAVTRCHSYNLTVQYQYVFNQQQYEAEEVIQTSSHYTLRGLRPFMTIRLRLLLSNPEGRMESEELVVQTEEDVPGAVPLESIQGGPFEEKIYIQWKPPNETNGVITLYEINYKAVGSLDPSADLSSQRGKVFKLRNETHHLFVGLYPGTTYSFTIKASTAKGFGPPVTTRIATKISAPSMPEYDTDTPLNETDTTITVMLKPAQSRGAPVSVYQLVVKEERLQKSRRAADIIECFSVPVSYRNASSLDSLHYFAAELKPANLPVTQPFTVGDNKTYNGYWNPPLSPLKSYSIYFQALSKANGETKINCVRLATKAPMGSAQVTPGTPLCLLTTGASTQNSNTVEPEKQVDNTVKMAGVIAGLLMFIIILLGVMLTIKRRRNAYSYSYYLSQRKLAKKQKETQSGAQREMGPVASADKPTTKLSASRNDEGFSSSSQDVNGFTDGSRGELSQPTLTIQTHPYRTCDPVEMSYPRDQFQPAIRVADLLQHITQMKRGQGYGFKEEYEALPEGQTASWDTAKEDENRNKNRYGNIISYDHSRVRLLVLDGDPHSDYINANYIDGYHRPRHYIATQGPMQETVKDFWRMIWQENSASIVMVTNLVEVGRVKCVRYWPDDTEVYGDIKVTLIETEPLAEYVIRTFTVQKKGYHEIRELRLFHFTSWPDHGVPCYATGLLGFVRQVKFLNPPEAGPIVVHCSAGAGRTGCFIAIDTMLDMAENEGVVDIFNCVRELRAQRVNLVQTEEQYVFVHDAILEACLCGNTAIPVCEFRSLYYNISRLDPQTNSSQIKDEFQTLNIVTPRVRPEDCSIGLLPRNHDKNRSMDVLPLDRCLPFLISVDGESSNYINAALMDSHKQPAAFVVTQHPLPNTVADFWRLVFDYNCSSVVMLNEMDTAQFCMQYWPEKTSGCYGPIQVEFVSADIDEDIIHRIFRICNMARPQDGYRIVQHLQYIGWPAYRDTPPSKRSLLKVVRRLEKWQEQYDGREGRTVVHCLNGGGRSGTFCAICSVCEMIQQQNIIDVFHIVKTLRNNKSNMVETLEQYKFVYEVALEYLSSF

SEQ ID NO: 131 - DNA, 11319 bp, Mus Musculus
agtgcccacctcgagcttccggcaggaggctcccggcgagagcctgggcggaggtaagtgggcgtgtgggcggtcccctgccttctcgcccggcctcagtttccccagctttccagtggctctgggcccgttcgcctggcattcgccgagcacgtacgaggggccgggtcttggggatggggggaaccaggtggatactgccgagcaggcgcggcagggacacgtgagcaaacacagtcgtcacgcggtgttaagtgccacgcgcaatgggggtcctggggaaggggaccagagcagagagcatcaggttgccttgccgaggaggacgccggctgatgttccgggcacacggctgtacgtggcgttgcagctggcaggcaggatccagggagaacttgcggacccagccccggggtctccggtctgttgggaccggcagtcttagtttctttccctgatgcaacttaaggaaggaaggaagaaagaaagaaagaaagagcttatttcccccatagttcttggtgctgtccgtcgtgaggaagtcagggcagtaagtgcttgaagcagctggccacgtcgtttccacagttctgaagtatagaatcttgagagccatcagtgcctgctagtgcactctcccttctttatggaggccaggagttcctgcccacagctacctgggtctcctcacatcggttaacctgatcaagagaatcaatcccttcctggtatgctccgaggcccgtctcccaggtgaccctagcttctgtcaggttgaccacactaaccattccaccagtctctggctccttgtggactgcaggcaagtgcaggcagtaggtgaacggaaactgtggtgtagtgtgtggtggtgggagaggaagtgaagagaagtgggtgggtcaaggaataactagaggtggacttgacaaggcaggagatgagggatgccgagggaggcagcaatggcttcactggtgctgactgccttctgccaaagaaaacagttgttcggttggccgtttctaagtgacttgagagtcagatgaagacccgaggaatattaaggtagctccttgcagcaccttgaggttgagctgtcggctggagttacggggttggtcgtggtgggctgggaatgaaggcggcaaagagaggctgggctgcagccctcaggcatctgtgcttactgaatgagtcagaaagaaggaagactccagagactgtggcaagttgcacccgctaggtctctgaggaggaagctgtcagtttcgtgagcagagccacagaaacccgggctctggcgaggtgacagggaaagagtaactgcctgggtgaacagcctgacagactgaggtaagggagtggggcctgacatttggaaactttgctgtaggtgacagaatgactcctgccattcgccagtgccaagtgctgctcctcgtgccagtgatccctctgccccccaaaccacacggccagagaaactgagtcagataactcagagtctcagttgtaggggacgcagacggcttttctcacagatctctgctgtgctctgaggcactaagctggacacccacgttccagctgaggaggtagagggcagccaggtgctacagtgtcgccccaccctgcgctgagggagccactgtttcttggggaaagggacacttactaaattccttgcttgggtagatgtgattagaagcctgctctccattaccatggagggagggtaaggcccttaggaattttacatctgtatagccagtgtgaggcaaaccgctgtttagtggggacacagagtggctatctgcttccaaggtcctttctggttctgtctgtgtggggggataggtgactttctgcatggtgccccatagaggtggggagctagacaggctctgaaggaaaggggagacttgagcagtggacaaatggcagtatggtgaccaaggaggaagtgcgccgaagtaggcaggttagtacgttgagagaaaagagaacaggatgccccatatagcatgccccgtgactgcctgggaaggggcggggcagcggttctcagggaggactgcacgggctgctctggagtgtcggagactcaacccagaccctccacatgctgtgccagcactacaaagggatttttggacacagtctgggttgttacaacttgggtttggggacatgatgcttgtggcatctggtgggtagaaacagggatttgttaacagattgcagcctataagattggccttgtcgggcaatcttagagtggtggcacacgcctttaatcccagcacctgggaggcagaagcaggcagatctctgagttcaaggccagcctggtctacagagcaagttccaggacagccagggctatacagagaaaccctgtcttgaaagacaaaacaaaacaaacaaacaaacaaaaaagactggcctcttccagaaagattcagtagtgccaggctgcagagtcctagagaataagagaatgtgggtctggaggtttgtttgaagaacgtttgaccctgggtccccaactgtttagcaatatccacaggagcctgagattagtggcccaggtgaacaggtctagtcagcagctagatctgcctctagagttcatggtgaccagagccggctgcatgctgggcaggtgtcagtgtgcagaaagcaggtcaaggtcaaggtaccaggctgccttaggcaagtggggcagggcctccctgatggtcccaccgtgcctttagtcacagcctgtttattaacctggacatcagtggtgtccaaacagtaatgggaaaggattgctggtgaaataagctgtttccctcttgtctatttctgtggtgctggagtcacagtgagaccactggtgagttcctcgtgctgcagaatgcacaagagtgagcccaccatgaggggaagcacacagcccccaggcccgcagctccagggccgtgagcactgttgcaaagcgggttttccagactgggaactcttccacttgggcagcacatgtggtattcttaacggtttcagtgtatggcagagccctggaaaacaacggttgctgaaaccagtggccggccctgtgcctttgtaactttcagattccgaatgcagaatccttcttagcctttatagtccctgctcactaaacgctgggcgcctcctccaggtcaccactcagggttctaaggtcctctaaagatagccacagtccaggagtcctttgggcaaagcccacagccagcccagtttaccctcagggaggagatgtgataacaggttccagagtgcagagtggtctgtccagcctgatcggggaagaggccaagctcagggttctggaaggttcccagagagctggcatctcagcttggtggggaggaagcacctgtagtacccccgaagaagcagatgtctaacagtgggccagggcccacccatgcagagccaggcttgccctgggcactcagtggtgttgctgggctgactgacaagaggtagtctggtttggcaagcaccccctctctgggagtagccgttggagaccagggcaaggtatggctgatccacctgaggtcctaaagacctgaaatcccatacatgctctctgtcagagagtcatcagactaaacgggaacatagagaaggccaggtgtgcatgcagccctcttggagtgcaaccttataagcattacactaggggacggggtgtggctcacagggatcatggccccaagcctcaggccctgggttctgaccacagcactaaaaagaaaaaaggtctatctactcaaatcacaccccttgagattgctaccaaaaaaaggctctggaggaagagaatttgtactgaagtggccgcattgacagggatggaaaggtgggttgggtgtggtgttccctccgtcccttctgggaacaaactggcagagacagactagaccagattagaccttggacctccaggcagggctttggccttgaaggccagctgggagctgctaaaggtctggagcaagctgactgatgagacctcagtcagctgttgaaaggtcccatgtagtgggaacacgtggaagacagtttgaatgtacactagagcctcaagtacctacctggatgggggtgggactcatgatctctgcagtctcatggcaaccagagctggtctgtagccacaccaccagaccctgcctctcttctctccagcagtagcgctggggacctgtgaccgctgcatccagctaaccatgggacagtttggctctggccaccagccccttaggtgaggactccatcaagggcccactgcccattccccatcatggaggccgagaggatccttccagccaggggagctgccctttgaaaaccgtggtcgagtcctgctggttctccctgccagccaccttcaagagaggctcctgttcctgctggcccacggatggggaggtgggccctggacgtcgcctttgtgtggaaggcagctctgaccctgggcctggtccttctatactactgcttctccataggcatcacgttctacaacaaatggctgacaaaggtaaccagaccttgccagtgcagggaccggcactaaggtggctgtagttggtacagctgtattgggtgatggtggcttttcctggacgctggtcccgggcgggataaacaggtggctagcaggggtggcggtgatgaaattggacaggaagtgagtccctgggctgccacttctctgtgtgacctccacagtggggaccagccacttgttccaaggggtcatgcagggcacaggattggcccctgccaccatagggaggagatagaggggaatgtggcatctctccactcctgctgtcgtctttgggcttcacagagcttccactttccgctcttcatgaccatgctgcacctggccgtcatcttcctcttctccgccctgtccagggcactggttcaatgctccagccacaaggcccgggtggtgctgagctggacggactacctcagaagagtggcccccacaggtaggtccagtgtggggagggctgctggagagcctaggatagaaagcagaggcccttgtggccacacgctacctacctcctctcctccccacctctctcccacggccaggtctcagcaaagccggcagttgcccttgtctggcagttgcccttgtccgtgctggctcacatgggcctcaagcgggctccaccagacgcagaatgggggagcctcaccctgtaaccatgctaagttgggctaaaagatttcctaggactagtgttgagtgggcaggacttgaagagtggatggggacctctgaccctggggatgtgaggtcggaaagggagctgagagctcggctggagggggaaaggaagaaggagggttagcaggctgggccagtggagggccaggtgcccctcgagccatttggcaggatcgggttaatcctcttgcatggaactgtttagattctctcgcagaggagactaacaggcctagccagtcaggatgggctccagcgctaagcaggacagcctttggctaggggttggccttgaattgcttagtggaagggaagacaaacagggccttaggtgtctaagccttatgcttgccaactggctgccctgcctgggtgtccctgtccccacagcactggcaacagcacttgacgtgggcctgtccaactggagcttcctctacatcactgtgtccctgtgagtactgaccacaccctctgcccccttcaggccaagcttactcgctccttccagctggcaggctgcacagccagcagtggaccagctcctccgccacccccagggaccagcccccccccccctctctctctctctctctctctctctctctctctctctctctctctctctctctctctcggcccctcccgagcacctggcagcactccaggcagctctgctaagcccagtgcagagagataggctgcacctgctggccaggcagcaaggggaagccaagggattggacagagatgctgcaagttcttggcagggtgggtgggggatggggatgggaggaggcaggcagcaggtaggaggaccaggcaggggagcgggtgagggtcagagatcacctgtctgcagtcacagccctgatgtctcacgtcagagagtgcagcccctcacttctccttgtccaggtttctctcattcttacctggtctctaccaccaaccaggtaaagaacagaccgagtcagcttggtgttaaacccccagttcaccctccagtaacagtcagggctcttagagacttcttcccacaaaaggtgacatatccacgcagaccccactggctggctccttccagtctcggagacctggttgccctcgggtgggcctgccgccatgcattgtgggtatctgctctgccccaggtacacgatgaccaaatcctctgctgtgctctttatcctgattttctctctcatcttcaagctggaggaactggtgagccccacgccccttgtcactctgtggcaggagactttctcggggaggagacgtagatgtgggtaatgactgaaggtttagaaacgggtttggcagcggggtctgcgtggtcccagggcctgggattcccctggggcaactcggcggctcctgtgtgtttgggggcctggaatgggcaccagtccttgagtgttttgtaacaagtgtgacattaggacatgccagctgcatgccagccacgagtcctgtggaggcgctgaggcatggaaggaaggctggtgatgcccagtctacgggtggcacatgcttgagcctggagctcccagtgagctgtactgtcccccctgtagcgtgcagccctggtcctggtggtcctgctcattgctgggggcctcttcatgtttacctataagtccacgcagttcaatgtggagggctttgccttggtgctgggggcttcgttcatcggtggcatccgctggacccttacacaaatactcctgcagaaagccgatcttggtgagcctctggggaggacttggggccgggtaaacacaaagcaacaggctcagcctgacaaaacttgccatgtcctgtcctgcaggcctccagaatcccattgacaccatgttccacctgcagccactcatgtttctgggcctcttccctctctttgccatattcgaaggtacgctcggtcttctccctctgggtgccatagaacagcagatccagcattgccactctgagctcagcacggtgctagccacagaggttgccctgtggtttgggaataggcagacacacagaatgactagcatctcgtgagacgaggatgcagaggaattaggagtaaaatgcaaggactcagggcagagggcgaggacagccccagaggcaccttttaaatgcacaggtctgtcatatccccttacaaccagatgtggagggctgttgtcatccctgttcagcaggagaaagaaaccgaggaaacgggacgttcaaagcttgcccacagtcccatagctcataagcaagccagactatgtccccacaacctggcatcaggaggctaggcccactgtcacactgtgcacttgcctcctagagtgcagagcccatgtctgtcacaggtggggtgtctgggctggagggggccatagtagagcatgattggtgggcgggtgaactgatgacgtctggataccctggcaagcagggcaagaggctcggccatggatgttagtccgcatgggcagagtggtcccttccacagctggggttcgggggcagcctgggtacatggacaactgttctatctcccatagctttcagaggagaggcaaagccagggggtgtacaaggtggacagaatgttgtcacctgtcttcctccagtgctttgggattagtctttgtcacttgtttaccctccttctcagagtcccaactgtcctcagggtcattacagaaaattccatcccacatccatttaagtttcaagcagcgaagcgtctccagcctccgtgaggaaattattccgcagccccgttgtccaggaaacttgtgtgtggagccttcatgcttttcctttttaaaatctctccccattccttcattatgccccttgtagcaaacaccacactcgccccctcccaggccctctcactgttcccgctctgcaaacctcatccgcaagcccctggtcgccgccacttagcagagcagcatggacttagctcctttaatcttctctggtaaattaatcccccaagcgccttcattacttatgttgctcttccccgaattcccttcaatttgcctttgcagcgctctgagcccggcaccaaacaagatggctcacacggccaggctgctggcctagggcatgctgctgtggaattttgcacccctccccctctgagccccccaaagttctcctctgccttcagtgctctcctgtgtccactgcgcccagtggatagtgacctcaccctcccctaacacaccctgaggccttactgtgggaagagcccaggagccctttaagaaggaggggcccctctcctgaaaatcgaagcaaaaattggtgtgatatgcagcgtgctctggaacaaggggctgtagtctcatcgtagtttacatatgtatgatttgggtcttgtgtagcccaggctggacttgagctttctgggtagctgatgcttgagccagtcctctgtccccctgcctcaggtgctgtgattacagctgtgcactgccacccctcagctcggggcttaaggtggagggtagtttttgagataagttcattaggtcactgcttgctgaagaagtgacagtctagtcactgtcctgtcattctgtcaatagggaaacccacagccaaagggggccatctccaccacagtccatacatagctttatagtagcaagacccagatgtgggctgggctgtatagatgggtggtagagcataaggctctgtgtgtgtgtgtgtgtgtgtgtgtgtgtgtgtgtgtgtatacacgtgtacatgtatactgacatgcacgtcatctaacatgcatgtcatctaaaggtgagggccctacatctgtacattttgtatctgtatacagtcagcctccaccagagtccacaggtacaattcctcctgttctgataatggacacgcattgccctgggctctgtagtagccaccttggtccctgagtctcaggccatctgtgggggactatttcaaagccccccttctttctcctacctcagataatcagctagccgcactccccaccccgcgataccatgctgaagaaacatggtagctgttgagtagggccaggagggctgcgcaggccccagcctcccactctccccttgctgctttcaggtctccacttgtccacctctgagaagatcttccgcttccaggacacagggctgctcctgtgggtgcttgggagcctcctcctcggtgggattctggccttcggtttgggcttctccgagttcctcctggtctccagaacgtcaagcctcacactctccatcgctggcatctttaaggtacacactgggcagccaccccagacctgccctggaaggagccccctgagggatgcaggatgtgatgtcattgtcccctgtggagctgagccagtgtcacttctcaccagcacgtagctctgaggacgcaggccaggcctcacaccgccaggcctgcagtgggcctaccttgggcctgactggcagcttgagttacatggcagtagcctggagcactgaatgctgatctgtgcagagtcccagcactgagggctgggtgcacaggtcatgtctatggaggagcctggtcaggtagaccccatgccggagcagtgacacccaaagcaaacatttgggtgttaagcatcttctagctctgatgaggagagacctgtcttaacgccatgctgagagctgtccatctgtgggtgcctagcaacagccgactcccttactgttgggggcacgtgtgccgcagtctgggggttggttggcattcagtttttgctgagaggcatgcatctcagtaacaacaggtctgcaggctggtggtctgggtacagaggtccccacctctgcctgtcacaccaagtggtctggctttggcctcagtgtacacagagccccgccttcctggccacagagtcagcttctgacccatggtctgcctttacccacaggaagtctgcaccctgctgttggcagctcacctgctgggcgaccagatcagcctcctgaactggctgggctttgccctctgcctctctggcatctccctgcatgtggccctcaaggctctacattccagaggtactgtggcctcctccccatggcttagtgttactgactgcccctcccaccatctagccaccaattgccagctgttgctgtagctcatgtgccaggtggtgctaccaccctgggaggatataagggccatccccagagaagtttactaggtcagtaactgtgacgtgtctaccccaaggtgatggtggccccaagcccctgaagagcctgggctccagcgctgacctggaactgctgctccggagtagccagcaggaggaagaggacggggaagaggaatattttgtgacccagggacaacagtgaccagcccaggagcagcaaagcaggccactctgtggtcatccctgctggcagatcttggccaggtccagcagcccagccggtttctcagagccgctgcaagtggtggcctcagagcttcctgcaaggactctgagcctccggctcttccctgtggagcttggtcccaaaaagcgaatgccaggctcacataggacctgagctgtcagtgaagggagccagtggcctgtctccaccattgttctggttctgagagccaaggtgaacgtgagagatgaggtagtctctcagattcggactgtggggtatcaggaaaggagtcatggagagactaggcctcatcacctggactgcagcttcctcagagagtagatttatttatagttgaaataatgatttcctctccacagcccagtgttgcctaaggcatgagagcagggagagccctggggcctggcctctcctccgttccctgcctggggccttgtcctccgctccgccttctgtagcccatgctcctgtttgtgccccaggccccatccttggggccacaccatggacccaccgcaggaaataaatgagtgtttgctcagtaccagcctctggagactaccagtgcctcagccc

SEQ ID NO: 132 - DNA, 2003 bp, Mus Musculus
agtgcccacctcgagcttccggcaggaggctcccggcgagagcctgggcggagtagcgctggggacctgtgaccgctgcatccagctaaccatgggacagtttggctctggccaccagccccttaggtgaggactccatcaagggcccactgcccattccccatcatggaggccgagaggatccttccagccaggggagctgccctttgaaaaccgtggtcgagtcctgctggttctccctgccagccaccttcaagagaggctcctgttcctgctggcccacggatggggaggtgggccctggacgtcgcctttgtgtggaaggcagctctgaccctgggcctggtccttctatactactgcttctccataggcatcacgttctacaacaaatggctgacaaagagcttccactttccgctcttcatgaccatgctgcacctggccgtcatcttcctcttctccgccctgtccagggcactggttcaatgctccagccacaaggcccgggtggtgctgagctggacggactacctcagaagagtggcccccacagcactggcaacagcacttgacgtgggcctgtccaactggagcttcctctacatcactgtgtccctgtacacgatgaccaaatcctctgctgtgctctttatcctgattttctctctcatcttcaagctggaggaactgcgtgcagccctggtcctggtggtcctgctcattgctgggggcctcttcatgtttacctataagtccacgcagttcaatgtggagggctttgccttggtgctgggggcttcgttcatcggtggcatccgctggacccttacacaaatactcctgcagaaagccgatcttggcctccagaatcccattgacaccatgttccacctgcagccactcatgtttctgggcctcttccctctctttgccatattcgaaggtctccacttgtccacctctgagaagatcttccgcttccaggacacagggctgctcctgtgggtgcttgggagcctcctcctcggtgggattctggccttcggtttgggcttctccgagttcctcctggtctccagaacgtcaagcctcacactctccatcgctggcatctttaaggaagtctgcaccctgctgttggcagctcacctgctgggcgaccagatcagcctcctgaactggctgggctttgccctctgcctctctggcatctccctgcatgtggccctcaaggctctacattccagaggtgatggtggccccaagcccctgaagagcctgggctccagcgctgacctggaactgctgctccggagtagccagcaggaggaagaggacggggaagaggaatattttgtgacccagggacaacagtgaccagcccaggagcagcaaagcaggccactctgtggtcatccctgctggcagatcttggccaggtccagcagcccagccggtttctcagagccgctgcaagtggtggcctcagagcttcctgcaaggactctgagcctccggctcttccctgtggagcttggtcccaaaaagcgaatgccaggctcacataggacctgagctgtcagtgaagggagccagtggcctgtctccaccattgttctggttctgagagccaaggtgaacgtgagagatgaggtagtctctcagattcggactgtggggtatcaggaaaggagtcatggagagactaggcctcatcacctggactgcagcttcctcagagagtagatttatttatagttgaaataatgatttcctctccacagcccagtgttgcctaaggcatgagagcagggagagccctggggcctggcctctcctccgttccctgcctggggccttgtcctccgctccgccttctgtagcccatgctcctgtttgtgccccaggccccatccttggggccacaccatggacccaccgcaggaaataaatgagtgtttgctcagtaccagcctctggagactaccagtgcctcagcc

SEQ ID NO: 133 - protein, 364 aa, Mus Musculus
MGRWALDVAFVWKAALTLGLVLLYYCFSIGITFYNKWLTKSFHFPLFMTMLHLAVIFLFSALSRALVQCSSHKARVVLSWTDYLRRVAPTALATALDVGLSNWSFLYITVSLYTMTKSSAVLFILIFSLIFKLEELRAALVLVVLLIAGGLFMFTYKSTQFNVEGFALVLGASFIGGIRWTLTQILLQKADLGLQNPIDTMFHLQPLMFLGLFPLFAIFEGLHLSTSEKIFRFQDTGLLLWVLGSLLLGGILAFGLGFSEFLLVSRTSSLTLSIAGIFKEVCTLLLAAHLLGDQISLLNWLGFALCLSGISLHVALKALHSRGDGGPKPLKSLGSSADLELLLRSSQQEEEDGEEEYFVTQGQQ

SEQ ID NO: 134 - DNA, 1884 bp, Mus Musculus
agtgcccacctcgagcttccggcaggaggctcccggcgagagcctgggcggagtagcgctggggacctgtgaccgctgcatccagctaaccatgggacagtttggctctggccaccagccccttagccaccttcaagagaggctcctgttcctgctggcccacggatggggaggtgggccctggacgtcgcctttgtgtggaaggcagctctgaccctgggcctggtccttctatactactgcttctccataggcatcacgttctacaacaaatggctgacaaagagcttccactttccgctcttcatgaccatgctgcacctggccgtcatcttcctcttctccgccctgtccagggcactggttcaatgctccagccacaaggcccgggtggtgctgagctggacggactacctcagaagagtggcccccacagcactggcaacagcacttgacgtgggcctgtccaactggagcttcctctacatcactgtgtccctgtacacgatgaccaaatcctctgctgtgctctttatcctgattttctctctcatcttcaagctggaggaactgcgtgcagccctggtcctggtggtcctgctcattgctgggggcctcttcatgtttacctataagtccacgcagttcaatgtggagggctttgccttggtgctgggggcttcgttcatcggtggcatccgctggacccttacacaaatactcctgcagaaagccgatcttggcctccagaatcccattgacaccatgttccacctgcagccactcatgtttctgggcctcttccctctctttgccatattcgaaggtctccacttgtccacctctgagaagatcttccgcttccaggacacagggctgctcctgtgggtgcttgggagcctcctcctcggtgggattctggccttcggtttgggcttctccgagttcctcctggtctccagaacgtcaagcctcacactctccatcgctggcatctttaaggaagtctgcaccctgctgttggcagctcacctgctgggcgaccagatcagcctcctgaactggctgggctttgccctctgcctctctggcatctccctgcatgtggccctcaaggctctacattccagaggtgatggtggccccaagcccctgaagagcctgggctccagcgctgacctggaactgctgctccggagtagccagcaggaggaagaggacggggaagaggaatattttgtgacccagggacaacagtgaccagcccaggagcagcaaagcaggccactctgtggtcatccctgctggcagatcttggccaggtccagcagcccagccggtttctcagagccgctgcaagtggtggcctcagagcttcctgcaaggactctgagcctccggctcttccctgtggagcttggtcccaaaaagcgaatgccaggctcacataggacctgagctgtcagtgaagggagccagtggcctgtctccaccattgttctggttctgagagccaaggtgaacgtgagagatgaggtagtctctcagattcggactgtggggtatcaggaaaggagtcatggagagactaggcctcatcacctggactgcagcttcctcagagagtagatttatttatagttgaaataatgatttcctctccacagcccagtgttgcctaaggcatgagagcagggagagccctggggcctggcctctcctccgttccctgcctggggccttgtcctccgctccgccttctgtagcccatgctcctgtttgtgccccaggccccatccttggggccacaccatggacccaccgcaggaaataaatgagtgtttgctcagtaccagcctctggagactaccagtgcctcagccc

SEQ ID NO: 135 - protein, 364 aa, Mus Musculus; identical to SEQ ID NO: 133

SEQ ID NO: 136 - DNA, 99161 bp, Homo Sapiens
atgggtaccattgtaggtgcttggtaagcactgaatgaactaatgcctgcatgatgccagctggcggcggtgacagccgcagtttgcataaaacactgcttacactctggccttgagccttctgttcagaggggccagggatcccagctgagtcacttgtaaggatccatgtttgcagctggtcttactgccagagagcccaggaggaggctagaggagggcgaaaggcacaaaactgggtctgaatgtgcaaccctagcttgccctggcctaatgttcttgactgcaaatgctgcccttttaatccatcccgcaagatgaagaaaatctgaactccctaggctggcattttggggccactgcaacctgcctcttggctactttaaccaccacagttacaaacaacctgtgagccccaggcacggctggagctttctcaccctcctttaggattctcccatttcctctatctgggatgctctctccctactcaacctattgaagttgagataattcttagaaagtttcatacagaaaatatttcacaaatgtttcgtattacttctggatcgcccaagttttaagttgtaatggccccagctggcctgagctcccagaagaaaaagcccatgagatacttatcttcgtggttcattccatggttgcccagcattagactggacataagaaaaacaatttgttcagtaaaagtaaacaagttaccattttttggatgctcactgtatgcagaacactagcaggcaccggggttccaaagcaagcccctgattgagcgcgggagagacgcagacaattacacggctgtgctctgagcctgagggacttcgcggaggacaaaactacgctgtacctcagaaagaccagaccacctcagaacccgaccacaacagacgccccgcccccgtgctgccccgccccgccttttcgccccggctccgcccagcccctgggtagcttccggcggaagttaccgcccgtgccgcggttcggcggcggcatccggcctcgcacttccggtggggagattccggcctggagctcccagggccgaggtgagtgggtgtgcggccggcctcccggcgcactcccagaggctggggggccggggctggagaagggaagcgggctccccacccgggatctgcgcgggttgacatggggcacgccacgcccctgcccctccccgggcctcagtttcgccgtctgtggagggggcaggggtctccaagcgccctcctgcaaggcacctgccggacgccggctcatctggtatttcctgagcacctgcgacgtcctgggtgcgggacccgggccggaatcggacacggccctgccctctgagaggctgcttcccgcggtgggattggggcgggcagtaaacacgtgagcaaacaaggaaacgtcagaggtgggagtgccacgaggattgggaggggtggggcattggagaaagtattcagccaagcggaggtctgcggaagggagctgaaggcaggaagagcagcaagtaaagaaaaacacaggtttgatgtgtttgacacgtggcagggggccgctgtggcgggtgctgggaccagtggcagaagaatgaggttacagaggccttccttgtggaccaggctgaggagctgggcttagccttagggcatgatctgtttcgtgtgccatctctctggctgctttatagattccaggccttaggggcgaaagaggaaacagggagaccagttagaccagtggcagtcagcaggtgaaagataattgtggcttagactgtggtagtgggaatggagaggaagagaagtagaggggtcaagaagtgtattgaaagtggaactgacagggcaggatttgagaaatgacagaaataagtggtcaaagatgacttcatcatagatttttggttttggcttaagtaaccaagtgtattatgctggcatttactaaatgactttgggatagattgggagcgtgagaaataattacgaaatcttcttagggcatcttaagttttagatatttggagtgcagctaccaaataggcagttagatatatgagtctgatacagaaaaggtcagggctgatgtaaagaatttagaaatcattggcaagtggattgggtaggatgagattatgtagggtaagatttaagagagaagagaagccaggttccaagctttaggcacccaatttttatagattgagttgacaagaaggtgccagcaaaaaagaccaataaggagtccagaaaagcagaagaaaaaccaggagaatgtggtatcgtggcacccaagagaaggttttttctaggaggaggaagtgatccattgtgtaaggtaagaatagagactaagccggcccggcacggtggctcacgcctgtaatcccagaactttgggaggccaaggcgggcagatcacctgaggtcgggagttcgagaccagcctgaccaacatggagaaaccctgtctccactaaaaatacaaaattagccgggcatggtggcacatgcctgtattcccagctcctcgggagcctgaggcgggagaatcacttgaacccgtgaggcggagtttgcagtgagccgagatcacgccattgcactccagccttgaaactccatctcaaaacaacaacaacaacaaaaagaatagagactaagccttcgaaggggcagcagggaggagggtgtggtgactcattggagcagtggagatgggctgaagtgagagcagggggtgaaggagttggactggcagtgcggggtcctctggggaagtttcactgttaaggggaccaggaggggagtaagcctctaccatgagccagcatttaatgctgtacctgatgccactttacagttggagaaactgagtccagaggtcaagtaacttagggtcacacagtagtgagtagggacaccaggatttgattctcagtgtctaactccaaagcccacactcttaagcactaaaccatgctgcccaagttacagttaggaagatggagggaagcaggtgtgccagtgatgcaccagccagccttaccttgatgtgactgctgcccccagctaagctgctctctgtggaaagtggggcagaatatggactttccttcctgagcaaatgagatttcaaaaagagttgtttactcctttaaatcttgtttcccttataaaataagggtggggaccttttcagtttcacgtctgtgtctccagtggtgggcctacaggagtgcttgataaatgctcattaagtgcctagatgatctccagggacccttctagctgagatttggctttgtgtttgggcataggtgaccttctgaatcccaataagaaaatgagttaaatttgagacagtgcttcttgtaggcggggtagccatagggacttattggaggcaggggaactgggccaggtctgtgaaggaaggtcagcatttgaacagtggagggagggtgttgcggtgttgcagtgctgcagcaggaaatgcagcaaaagcaggagctgcaagaagttggttaacagaagagtgaacagacttccctggcttggaagccacaggaggagccatgagggaagagtgctcagaagaaagctctgttagtgccagcatgtcctgtgagtgcctgtcacaggacagggtcagcagtggttctcaacagggagcaggtttgatcctcaggtgacatatggcagtgtctagagacatttcttgggtatcacaacttgggatggggggaaggatgtgacaggtgtctggtgggtatgggccagggatgttgctaaacatcctgccatgtagaggatgggtcttctcacaaagaattatctgtccccaaacagcagtaacgcccaggttgagaaaccctggcgtagaggaaacagtgtgggttttgagatctgtagacgtatgtttgaggcccatgcgccctctttgttggaggagcctgatggtggtggttgcaggagaagtagagagaaccgtgtaggagactcctgcagtcatttggggagaggatggtggctgagatggtagtggtggagttcaggacatgtgctcatatttgggatatttctgaagatagagctgacggtatttattgattgaatgtgggctaaggggaagagaggaatcagatgagcctaaggcttttggcctgagcaactaggagagtagtggagccatttgctgggatgggaagtaggaagaggagcaggcttggatgaaatgggggtgtggaaaacacgagtcagtttcagacactctagatgtgagtgagatgcctgatattagatatctaagggaagaagaggttaggtaggcattggatattcttctggagttcacatgaatcagagccggggcatatattgggaagacatcagcttacagaaggcatttgaaggaatgagaatgcattaggtcaggtaggagtctcaactcattggatctgacacctcttttttattacaaatattttgtaacagtcccttttattaccctaaaatgaaacatatgattaataaaaactgcctacacataattttttaaaaatcaacaaatgcagccgggcgcggtggctcacgcctgtaatcccagcactttgggaggcaaggcgggcggatcacctgaggttgggagttcaagaccagcctgaccaacatggagaaaccccatctctactaaaaatataaaaaattagccgggtgtggtggtgcatgcctgtaatcagtcccagctactagggagcctgaggcaggagaatcgcttgaacctgggaggcggagcttgtggtgagccgagattataccattgcactccagcctgggcaacaggagcgaaacttcgtctcaaaaaaaaataaaataaaatataaataaccatgccctataacataaaaggaaagtaattgatagtaaaacaaaatatgtttcaatatgtaagtttctgggcacaatagtgctggaagttgcagtgaagctgtcccttctgtgtggaccctctaggagtgtgatggccacagacacagactgacacagccgtgttgtgtcgcacctcgaaaaccactagtgccattgctgtagatgatgtggtttttccagaatggacacttttggtgccattttgagaccaattttgaccattttcagtctcccttcattgtacataggcgtcttattcttggaagtgttagttcacagcagaaccatggaaacactgcactgtgtttacatgtaaacagagttacattctaggttcagataattataagctaatctttcacctatatggatgtcaaagtcgtgcgggatgcagagcagtaattggctatgtggactgccccttctttatccctgcttactgaacgccaggagcatatccccaaaataccgccacaggtttccaaagctcctctgaagacaactgtagccccagagattcatttggacacagccagctccctgtttgccccggggaggggaaatagtaacaagagttccagagtgcagaatggaatgtaactgctcccttcagaaatgttggggtgggagatggagaatgtgtctgatcgtgaagcctaggaaggcttcgagaagaaggtggcgtttcaataggatgggaatgtctcaaaggaggatctgtggttgaggggggcacccagatgaagcagcaggtatcatcacataacactggacctgaggctcctccaggcacagacaggtctacccggcatgctccgggcactcatcagggttggctggattgacagggaggctgggagtggtttcatttggcaataccgtaaggcaggctctgcttccagggagtagtggttacagcctggtcttacagtgttccagccgttagagtgttggtttccttctccatttttaacccctaaagaccagaccagtcccctgaaaatcgcatgcctgctctctgtcagtcatcaaaccagacggagaacttaaagtacaccagctgtgcgtaaggccactgtggtcttactggtccctatctttgtgccgctcgtagcctctcaggggacagacattactcaaatcacaccctgcacaagtgctatgaaagagaagtaggagagccgtgaaagcaacatgtatctcaggggactgattcaggggatggggtggggttccctgaagaagtgacctctgagctgaagataggtaggattgatgaaggactgaagggtgggtgcagtgttcgttcatttccttcagacaacgggaagaaagctggtgtgtttggggagctgaaaggcgcccagtggggccaggtcctggagagcctgtggctgagactgggaagaccagcagggccagatgaggccatgggagccgaaagaagggtgctggtctttatcagaaaagcactggaagctgctgaagggttttaagcagtggcctgacatgatcagtttgtgttttaaaaggtcactttggtggcagttcatggagaatagcttgaggtgacaagacagcagacacgacgtgggtctctgggactgcctgtgccgttgtgggcagcccctccagagccctgagtcacgcagccttcagaggcacccatggctacgagaagcacagtctctgcctgaggctccagagcggccctttttccccagcagcagaccttgggacctgtgagcgctgcatccaattaaccatgggaagggtcagcaccagccaccagccccttaggtgaggactctgcctggggctctgctgatggttccgaatcatggagctgcagagagctcctccagcctggagacgttcttggtgaaagctgtggtctaactccaccggctcttcctgcacattgtattcaagaggggtgcctgcccccgctgactcaggagctccggtgctgcagccgccacgaatggggaggtgggccctcgatgtggcctttttgtggaaggcggtgttgaccctggggctggtgcttctctactactgcttctccatcggcatcaccttctacaacaagtggctgacaaaggtaccaggaggccttgctggggcggggtgctgggatgaaggtggccagagccatggctacggtgcccttcatgtttaacaggaaggcacaagcttcaaccagtctaactggaagccagtcacggctgggctggaacagggccctccaagcctgccgtgccagggttccccttcagtgtttggatccagggaaaccaaggagagcggggggtgtgaagggatgagctggggaaactggggctcaagcagcagctatttaccccactagagaagtatttcaatattttaataagtgatacaacgtagtgggccgcagtggctctcacttgggcataggccgtgaggaaggctgggcaggtagctcacaggtgtgttgaaatggtggagacagcaccaggctaggattgagtctcttggctgccacctgtcttcgtgacctaagagtctgtcattccaagcgatgataccgtaactaagggccctacacacatagcaaggtcctcatgaaccaccgaatgagccccactccagcagaggggcgaagaggaagagggagccggtggggggcaggctgtctaaaccaagccggggtgtctgctttgggctccatacagagcttccatttccccctcttcatgacgatgctgcacctggccgtgatcttcctcttctccgccctgtccagggcgctggttcagtgctccagccacagggcccgtgtggtgctgagctgggccgactacctcagaagagtggctcccacaggtaggtgggggacctcagtgagggcagagcaggaagaggggctggggaaccataggatgagaacaagagagacacccgcatgtctggaagccaagtccctcccctcttcctgcactgttcctcctctgccctcttgacctggcctcccaccacccacgctgctgcctcttgtgcactgcgtgccttcccactgccccaccacacacccacaaaaccccccctgcacctgcggccccgcagctccctctcctgccagcagacaccgagcctggagtgcagccctcaggcctggagataagtggtgagcaggcagggtccctgccctcgcagggctgtgacacggacatggagggcactacggagcccagggaggggaccaacccaaggccggggcccgtggctggtagaggaagatttcctaggccaggtgccaagtaggcagagccctgaaggatgcgtgggactggttggccctgggaggaggggccctcgtggcccgagggagatttagtgccagctgtggggtctggaagggaactcaaagtgtttcaggatactgagaacccggtgctggccagaggaagtgggaaaaatgagaactgagagggtgggcaggggtcatgtcctggaggccggattccccgttccatcctgagggaaaagggtttccagtaagggatcaaccagatcaggttaatacctccgctcagggggctcgccggagtgtttgtggaaaccataccggcccagccagttggaatgggccccagccctaatgctagagcagcccccgacctttgggggccagatattaaccctttagttgctggtggaaaagaaggcccaagggccccacaggaggcaccgggatggttcagaagtgggggacactcaggtgcctcagggtaccagcccaccccagcagagtgtggacctcccacgctgtcctgtgggtgcctgtgtcttcacagctctggcgacggcgcttgacgtgggcttgtccaactggagcttcctgtatgtcaccgtctcgctgtgagtactggccatgccctgctgcctcccttcaggctgaagctgtctgtctgtccagcggggtgtctgcacacccggctgctaggccagccactccaccactctgggaccagcccttgctctctcagcctctccctggcacccagcagctctccgggaagtcgccagcctcttccgtaagcccagcgcagaggagatgctgtgcccacctgccaggcagcgtggggaagccagggagctctcccagaaccccatcatcagagcaggggaaggcaggctgcaaggccacagacaggtggccactggtgggtggtacacgcagccgcagcagagccctatgtggcctgggggctacacaagagtttcttcttccctctgatgttttgcttcagagagcactgttcctgccttcttgtcctcctacttctcatccttccttcccgctcctgggctctgccgagggttaggtaaagaacaggactcagggagctcaacgtcagacctgtaacctcttctctctggtgataaccagaggcctcttagtcagagattccttctgattaaaggtcgcttatcactcagatgacagcccagctctgtttggtcatttcgctcagtgatttgtgctcctgctcctttctcggtgatgggtctgagccctgagctccagcagtgcattgtgggtaattttgcttccaggtacacaatgaccaaatcctcagctgtcctcttcatcttgatcttctctctgatcttcaagctggaggagctggtgaggccccagcgtctcttgtgtccttcctgcccccacagatgctaagaataaagtgggagtctgagcagtggcttgtcctgctgtgtgacagaggagacaagcccagtccaggtggcagtagatccctttctgagaagggacctagacatgggcaatactcagaatatttagaaaccagtgtggcagggtaatgaccaaaggtgaaagcactgcgggatgagggtcccagcagagctgggtctaggaagcaccctgctgtgggaggcagtagccctgtgtgttaggcccagggaggaggtgggaccacttgggggcctaggacagccgtcagtgtggcagagcaagcagggctgttggcataccagctgaccgtcagccctacatgctgacattggtgggcaaggactgtccaggaccccctgggatggagctgaagggtggaaggatttcttgccccaggggcagccaagatggctgctgaccccaggctccaaatgtgatgaacccttgaccctcaagacccccgagttagctgccactgctccccatcctaccagcgcgcggcactggtcctggtggtcctcctcatcgccgggggtctcttcatgttcacctacaagtccacacagttcaacgtggagggcttcgccttggtgctgggggcctcgttcatcggtggcattcgctggaccctcacccagatgctcctgcagaaggctgaactcggtgagcacgtgccactcatcctccagagagaggaaccccggcacaggcagggcggaggcagggcagggccggaccagacctgatggtgcctgtcccccgccctgcaggcctccagaatcccatcgacaccatgttccacctgcagccactcatgttcctggggctcttccctctctttgctgtatttgaaggtacgttgggccttccctctcaagggcacctcagtgcagcagaccacagatcctcgccctgagcccaacacagtggtagctgcagagattattgagatcaaagatgcagtccctcccctggaagcgcatggtttggggtccagcatgataaacgctacagagaaagcacatataaaattcagggaacagtaacagtaagtgtgcacagagccctgaaagtgcaccagggctgttctgatctttttaaacataggaactcatttcatccttccaaaaacctggtgtggcagtactattattatcccccattttgcaggtagaacaaaatgaggcccagagaagtaaagataacttgcccaaggtcccatagctcgtaaatgagccagaatttgaagccagcagcctggctccaagtggtccagccctactcttaaccaccctatcttgcctctaaggagtggggaatcagggattgttccaagatgctggagtaatcaggcaagtcagaaaggcttcccaggccgtggtttggagggtgagtgggattttggcaggctgcagggagcaaggcatctcggaagtaggaataggaggttcagccatgtccaggaatataacctggggatgtgtgttcaaggagtgtgggccacgcaggatcagcagagggtgggcttccagagctgggggctgaagaccaggagccagcacacaggagcctggggacatggtcagttgttcctccactgtcgtcctccagggatgaggagagccctggagaactgtgtaggctgggaggtgtgacgccaccttcctttctttgatgttttgggattagcctttgtcccctttctgtttatccttcctcccagagtcccgtctgtaatgccctcagggtcattacagaaaattctgtcccacatccatttaagtttcaagcagtgaagcgtcttgaacctccccaagaaaattattctgaagccccgttgtccaggaaacttctgttcagggcctcgttttttttccttctttaaaatctctccccactccttcattatgcccccttgtaccaaacgccacactctccctcccctcccgtgtgtttacaccatgccccatctctgcaaaacctcatctgaaagcccctggtagtcgtcacttggcaaagctgcatggatttagctcctttaatcttttctggtaaattaatcccccaagcgccttcattacttatgctgctcttccccgaattcccttcaatttgccgacgcctttgcagttctgctgagcccagcaccaaacaagatgtcctacactgtgaggctgttttgcctggggggactgtcactcggcatttctttggtgcttccctccaaaaatctcaaaatactcgtccagcttccagctaccacagttgtctcttgtgcccagttctgggccccccttcaccctgtgctaatacaccacgaggactttcgtgtgggagggacgccgggagtcattcttccagatggacagtgttggagggaccatgactcctccgaaagtctaagctgaatttggggtagggggtgtgcatgcctgtgtttctggagcaaggggccatgtgtttgcattttctttttgggaaatgttcatcaagtgataccacgggttggagaaataccagtctggtcccaggcctctcattttatcagtaaggaaactgaggtccagaaaggggacacatctcagcccaagtcccacagctctgtactagcaagacctagattaaaatgaacgtttgtagggatagaattttgtccctgtttgtaggtgaactggctgaaatgtagaccaaggagttccctgagtgggctggggcactgttggtccttcgtcacttggtagccgccctaccttctttagcccagtagttaccacagctccaaagaccccatgaagtcagcagccatgagcccctccccacagaccagtaagggaatactgtccaaaggtgcagggcacttccatccgtctttccatgcagggccacccccctctacttcaccccagaggctcagacgagccctccccatcattccgctaggatccccatcatcccactaggatctccatcatcccgctaggatctccttcatcccactgggatctccttcatcccgctaggatcccatcatcatcccactaggatccccatcattccactaggatcccatcatcccgctaggatcccatcgtcatcccgctaggatcccatcgtcatcccgctaggatcccatcatcatcccgctaggatcccatcatcccgctaggatccccatcatcccgctaggatcccatcatcctgctaggatccccatcatcccgctagggtcccatcatcccgctaggatccgcatcatcctgctaggatctggcttgtattgcccccaggcgctctggcagccatcactgcttccctggtttccccaggtctcaggccatctgtgtgggatcactttataccttccatgctttttctctgggctgcagacagttagcaggtctcagtaagaactcactactacagtggaagatcttgtgtggttggcattgggctggccaaggcagcccaggacccggcctcccactctctctccctgttgctttcaggtctccatttgtccacatctgagaaaatcttccgtttccaggacacagggctgctcctgcgggtacttgggagcctcttccttggcgggattctcgcctttggtttgggcttctctgagttcctcctggtctccagaacctccagcctcactctctccattgccggcatttttaaggtacagactcgggcgtgatgccagtcctgtcttagagagggagcccccaggggtttctcaccagcagcttcagtcccagctcctgcaccccagggccctgcagagaagagaaggaagtgccccattaggtgccaggcactttgctgagtgctgtgctggcccctccttctgccttgaccacagccctgtgagagggtatgatcactcccatcccacagacagggacacagatggagagccgcccctccccaagggcacagcaggggcctcaaagccagctctgactctgctaggcctggaatgcattcacattttaccttgactgccaactctggcactgggcagtggcctggagccacaggttgaacagcccctatccagactcatcaggaaagagttccgtgattgactggcggtgtcctccaaggccatggccagggctagtgagaccctgagaaagcacccctgtggccagccttgctgtacctctgcctcgcaggcctgtccttccctctcatacctcttctcacttctccttctccctcccacacatttcaacagtcctccctgttcaggggcagggagggacttttctctttggccaggcacacaccagtgttgaagcagtgttgcctaaacccagaaatgcaggcctgtccaagggtcttctggtggccagccgcatgctgaggcatggctgtggttcttggatgaacggccttgccagtcctgtttggagtctctgtttatagagagccccgggaccagttgtgtcttcagtccggggtaacacagcattctcacacataggctcagggctctcttctgtggctgccttctggggcagccgtcctttatccttgtggataaggcgcgatctggacaccctggtccccagcctgggatctggtttgcctcttttattcctgacagaattccatgacaagcacctcctttgttgcatctcacaaaaggaggctggcgggacagcgccgcaagccggccgggtcccctgacctctctgcctgcctgggcccaggatttcaggaagatcttgatctgcccacctgagtgtacctagtgcccccaccttccaccctcctggtcaagcagccaaatctgcctgttgatcatgctccctcctgcttctctgcccccaggaagtctgcactttgctgttggcagctcatctgctgggcgatcagatcagcctcctgaactggctgggcttcgccctctgcctctcgggaatatccctccacgttgccctcaaagccctgcattccagaggtaacccagagtcccttccagaagcctctgttttctgttcttctccctgtgactcttagtgattctgatgcaggaagtgtgcccggtggctctgctgccgtcactcctctaggaagatgtgggggtcatctccagagtgggtgggtggggcctgggtgactcagcacacatgcaaatcagagcaaaccaagaaaaccacgactgggcctgtaactgtggtctctctctatcccaaggtgatggtggccccaaggccttgaaggggctgggctccagccccgacctggagctgctgctccggagcagccagcgggaggaaggtgacaatgaggaggaggagtactttgtggcccaggggcagcagtgaccagccagggcaaatggcttagaagcaggccactccccagcctgctgccagcactcactgtgctcaagccgccagggctcatcatggtagctgggagctgtggacgggagtcaccaggtggtggggccaagccagggactcatgacttttgcccctcccttcagagcctggtcacacaaggggcgagcaccaggccagcctgggactggccagagctgggcccaagctgcgctggaatcgcagcaggagaggggagtgggctggttcttcccaccacttcccaggctctgacagccgagactcatttccaaggcacagcagctttctaaagggactgagtttggactgggttttggacctccaggggctggagcttcatcacctgggcagtgtcttttctcagagagcaggtttctttatagtttggaaataaatggttcacggtccactggccgccttgtgttgctggagacgtgggggcagggaggggacagtgtgggcctggcctctcctttcctttccctgcctggagccttcttcaaatgtctggtcttaagccaggcctccttcattttctcgctcctgttagaacaccagtcccctccccagtggggccccactgcacctgctggcaggaaataaatgaatgtttactgagtactgcattctggagaccttacatgttttcacagcctagtttgaatactggctttgtcactagctgtgtgaccctaagcaaatgacctaacctgtctgtgccgtagttttttaatctgtgaaatggggataatgtctatctcagagtccttttgaagattgagtcattattagtaacagattaaatgttatataagcatttcttttaatccttttaacaactaagagactaaagcctggaaaagataaagagctgcttaagtggccgggctgaggttcacatccaagtctgtgtacgtctgtgtgtgcacgtgctgcacgtgacatccacacagcctcctggaacttcatgggaccctggggcttgggctttccactcctccttggccaagtcccacgtcttctctagactgcaggcctctctcaaatgaggaagggagggggcaagaccccagctctgatgtgctgtggactgagtctactcctgtaaactggttcccgggccatgggagacccccccggcccttggggacaaagctttccaggcgaagtgctcctaggcactcacagcaggtggcgccattgcaccacactggctcccagagcccagctgccctgccacggctatccagacaccggcagaaaaggggtgcttggaagaggacagtgggtatccatgggtggggacaaggatagggcttgttctaaaattgtttccatcaggttggagtcactaaagctcgttcggttaagcccaggagaactttaatactttaaaaatgggtctgcaaacttcctgtaaagggccagatagtaaatatttggggtttggggaccatatggcgtctgttgcagctactctgccatcgtagcacaaaagcagccatagatgacacagacccagggtgtggctgtcccagtgaaaccccatttacaaaagtaggatccagcttgctggctgaagtttaccagcaggagaaccctcaagaattctcgagtccaacttccacttctgcagcaggagactgaagccaggagggggcggtgactagcccgaggccctcagagcctccgtgctcaggagtcagaccgagatctgcctctaattcagattcccagcacagactcagcaggcggaggtggagcaccaagggcgcttggaagcggcctcttatctggctcctgcacctctgccccccttggattccgcaagctcagaggccaagattaaaggaggctcgtgctccagctggatgatgtgggaagagccagccaaggaggggggccagggcctcctccgtcttagaggctgcttgggatgcaggctgcttgggcggcagggggagtctgccagagccccgctggctcaggtggatgagagcttcctgtcagctcccccactgcccgcctcccagcacagggagcaagcgttgctgtctggtgcagtaattacaaggtgcagagcgggggcccttacctcgcacatgttgggttcaatgacagcccttcatttagcagcaattaccagctgaacctaaaggagggctccctctcctcccccacccagcccacccaatcgcctggcctcccaggccagacagcgtccacctcggcattgagccctagaaccacccatgctgtctgcagccattgcatctcagggctgcagcatcaccatggcaacgcggtgcttgcacaggttgaggggaagctgaggatgtgacttgtctctccaaggctgtggtgtctgtccccacacagccccagctccgaggcttctgcagaaggggcggagagaggactgacctgcaggttcgagtttcaagtgcttacctgcccaccacctctcccaggggcccacagtggaaggaaggttaatggctccaatatgtgaggacgtccacagttggtgttgtggtggcggtgagaatgggctgcagtttgcctgtgggagggacctgagccatcaggcagggcccggcataccttcatcttcactccggtacccttttctgccttgagggctcaagggattgtctccatctgtttctgctttatcctgctgtgaaaaacctgaaaatcccagtggcttgagagtagttacatggcaccaagagaattctcctcatggtacttgctgcagcttcctgcatcacacactagtgatggactgagggtggggactcccaggccatccatttaggtcgacagcattcagtgagtactggctacatggcagacactgccggacttggggacagagacattcatttttggagtcagccttcctcccagcccaggaaagtgatgaggcagtgggctggggaatggggaagaaagaacagaaaagaccgttcactgggcaccatctaggcctttgccataggttatttaatctgtaacagcccggtgcagtaaggactgattgtatttctttcctagctgtggaaactaagttccaagtggttaagcataacgatggctaaggatacaacctgcagacgccgtagagtgagagacgtgtctctctttgctgtgattagctgcgtgcttttggacacgttgctgatcttctccgagcctgtttccttgtctctacagaaggaataataatacatacacctgaaggaagctactgtgaaggtgaaataaaataatgtaggtaaagcacacagtgctcggctcatagtcatcaccactcaggaaatggagcaggaaggacgtcacataactcgcccagatgagaggaggagccagcgttggagctctggccttccaagatccccatctctgctgcagtgtctggtactgagcatgcacttaacagatgctttttttttttttttttgacatggagtttttgctcttattgcccaggctggagtgcaatggcacgatcttggctcgctgcaacctccacctcccgggttcaagtgattctcctgtctcagcttcccaagtagctgggattacaggcacccaccaccatgcctggctaattttttgtatgtttagtacagggagctctaaagctgagatgcctttcagagttgtcccaagttggggtgagaggttcatggctttacgccacagcattttttgtatttttagtattttgtatttttgtatttcagtacatgttggccaggccggtcttgaactcctgacctcaggtaatccacctgccttgacctcccaaagtgctgggattacaggtgtgagccatcgcacccggcccagatgcttgttttttgaaggaatttccactagcggaaactaaagtggggattttacaggttctaacttccaaatgacttgccctgtaagaaggggctgctccctcccaccaccgcccattcctgccagcctccggtctcccagccatcccatggagttttcaccctaactgcacagccctgacatcagccacgtcccttcacccctgctttgtagtaaccaattagcttaacgtctgttcccatggttatttagtttcgttggcaactaacatacttccagaaacaggccagcatctcccagtcccaccaccatcctgctggtggggccgtcctcttctggatgtcagatgagaactctcctgctggggaacaacagaaggacagaacatagaaccagaggaaaatgcattcaaatgcattccatcagtgtttctggacagtctacaatgtgccctggccggtgatcgctgctggagatatcgaagtcattaaaacatggtctctgtcctcaaggaacttctgtagggctttttattttattttattttattttattttattttattttattttattttatttattagagatggggtcttcctctgtcttccagggtggagtgcagtggcacaatcatagcttactgctaccttgacctcctgggctcaagtgatcctcccaccttagcctcctgagttgctgggactgcaggcttgtgccaccatgcctggcttctgcagggctttttaatccagtggattccctgggaattagattcagagatggagattagagtgcaggacatttattagaaagtggtcttggaaaaattacctgtggaaaggagaaggcggcaggttagggcagaggggaagttgagcttcaaggcagtcctaccaaaagcctcagccaaccccatggggaactctaaagctgagatacctttcagagttgtcccgagttggggtgagaggctcatggccttacaccacagcattgacctgtcattggaagtgagcctgcccctggaaggagatgtgactttgggtaaggcagtttcttcaagacaaaccccaaagaaggatgactgccggactcccagcaactgaggaaataagtccttcactcccaaccggagacctgaacaccacatcacagtgtctaccacaaccagggtccacagtctggcttcagggatgaccagggatctctgaagaggaaagcagcatccagcatgtgtgtgcatttacatgtttttctgggagacagtgtccttgacccccaaaagattaagaatcattggtctatggaaagccagactcattcaaaaccgtgtgatcagagatgtacatggtagttgttcaacaaatataaaaggacggatggatggataatcgatggatgggttggtggatggctggatgggtggatggacagttaggtagatggatggaggggtagatggatgaaggatggatggatggatggatggagagatggataatggatggatagatggataggttgatggatggatgggtagatatatgatggatggatgaatgggtgggtggatggatggatggatggatgatggatgaatggatggtagatggataggtggatggatgggtagatggatgatggatggatggtggatggacagatgccataatagttgaatgtatgggagccacaggaaagggagcaaccgtctgggtcaggaggagagcagacttccaggaagagctgacccttttgaattgagtcttgaagactaaatagaagtttgctaagcagacaaaagaggcgtaccttgcaaggggaaagcagatgcgaaggtgcagagatgtgtgtgagcttgaggttggtgtgtttggctgctgtaacaatttgttcacccgtggctggccagaggtgcacatggggaaagaggagggggagcggggctactgatccatctttgaaaagaggaggtatcctgataggattgttccatcatgttattttgaacaagtaagtagatcctctccccgccccctaacagtcaacagtggtatctctagcatgaggagggggaagagggaggtcctaaaataatttcatgcgagtaaagagcattgggtcatttaccacatccttttccatgcttgagctccttagtcctgcaatccaccctgggaagctgttggttctgaacagcccctgctttccagatatgaaacaggctcagagaggccaagtgacttgcccaaggtcactcagctctttagccaccaagcagacagccctatagcccagcaggggcttacacctcccagagctcagcagccctgtggttgggatggcaggcagcctcactaccctcctgagattaggttactctggctagggacagaaaaggtggcccactgtagggggcccagggcctggcggcatcctgctggcaatattttgctttgcgaggaatcccccactgagcccaagcctcccatcctgttcctgggctgccccatgaattaaacatgcccccatggttaactcagtaatgcttttattaatagttaattactcaacgtgcactggggaaatgagactcactcaggcctcgtaaattaaggcagtgatctcgtgaaggaagccaatgggagttcattaccccagccccttccgacattgtacctctgggcttgccatttagcggtgctaaacgagatgcgctggcgggggcaggaaggggggacacgcggggacaggagccttctgcagggggaggtgggaactggaggatgagtgtccaccagtttcctgggagagaaagggccctaggagatggggcggaagcatcagctaggaaatgtgatccctgcaccttggcagcttgtcatctgcctgtgtttcctgtcactgctagggactcggcacaacctccagggattcccagatggggcaaggccatctgtctcaggtgtgggactccctcaccccgtctgggcctggaaccggccctgccccagcctctgctggtggcgtcccccctcgtgcagcccttcaagccctgggtagggaagagcagatccctcctcagagtccagggccctggcctcccctacccctgctctctcatttcacaaatgtcgagacttccccttctagtttttgttgtgtctgaagccaatttcccatcctgactgtgctgccgagctggataaggggcttgcgctaacctggtttcgtttttctaaatttacctttctcccaggttttgtttcccaggagacagaatcccctctatttatcttcctaggagaagacagccaatgtccgctttgaacctactatgtgccaggacctgtccctgtgggttatgttcgttggctttagtttctagccatgtgactccacctcccggggtgtctatttcttcatctgaaaatggagatgatcataggacctgagtctggagtcactgtgatgattaaacggagtggttagacactgcccaaaacatgtcagctctctctacggggcagctgtcattacttgcttcttcacaacagtgctgccagctggagaccgtccccattctacagataagcaaagtgaggatttaaataccttctttgaacttgcctaaggacacacaacccagaacttcatgttgccaaagtttatcatgttccttccttagaggcgaagtggggcaccgatccccactctaggagggcacactggccaagcctgggagccaggagagatctgcccatctgtccttgagtcacagggtctcaccaaggcagtgtaggatgagacgcaaggccctgcagttgggctggcccaggtccaaatcctgccatacccactggtcatcactttaacccctggaacctcagtttccacttctggaggaatgggcttgaggtagcacctggctccgtgggcggccatcagggcttccgtttggaagtgcctgacatctcgtagtcagctttcagagctctctgcacctgggctgctttatctgtaactggggataacaaaaaacgtctcttgctggattgtggaagaccctacagagataaagggcaccaatctgccttttgagcaggcaaatgtaaaacaggtgagctgctggtgcagaggtcaaggcccctcaaaaacagtttagcagagctgctgggggttaaacactgcctgggtggatgaggtgactgctggcttgatgagggctctcatgggtccgtgatgcagagggttggggacggatcaccacccaatgtcctcctcagctcccagctgctttgccaggcagaggtcagcctctcagctgtgactccccaggactgccagagccacaagcgggcaagaagtctggggtgggagattgaagcctccccggttagggagcacaagtcgtgaaggagtgcggctcggggttcatatataatatgtagcatcagatttaaatgtcactgctgcaggcggctgacccgggtccaacacaatgggccgcaaggggcagcgccgccgcctcttcatcttcctggcggtagctgaccaaagggagggagatttggtttcttaaaaaactaaacagttgttgagcactctggcgttgcctgggcaacaactgagggggagagagaagcatcttattgtttaaagttattcttgctcgatttcaaagggctgctctgaaaagaccacattctccaagcagcgtggctggtcctctccgccgtccccgccatgccatcccagctcctgccctccctcagcccccatccccacttcccagcctgaggctgcaaaaggggttgtagctgtgctggacatcagggcgctggagacagcctccctcatgcgctctgtgcgttcatccgcagggcaagcagaaacacagagacaacacgccgtgctactgcagccacccccgacctggacatgtgggcacaggggcactgtggtgcttggtgacttaggggtcagctcagcacaagtgcctgaacttgggagtgggcagggagggacgggggtgtctccatcgtgtatgttccaaatgtgaacatcttggttttcaagcccagacgggggcaaggagaaggtggccgtgtcaggtcattactcaggggcagtggctgagtgcagccccatgatccctcaagagcatgccaagtggcctgttgtctgcacccctctgcccctcctgcaacgctgtattggaattgtttattcatctctcttacccaccagactgttagctccctgacagcagggctgcgtctattcatctctgtgtattctcacaagctgcctcaaatcctttcaggagcaaggcaaattctgaagatccgaatgagatgtacatatattgttaattaaaaacatttagagggtgaaaacatacacatgatacagaattcagaagattcaaaaggaataaaaacccatgtgtcctggtgctgagtttccctccataggggcactcctagttcccagcatctggtggattcttctagagatattctgcttatatagacacagatgggcctaaaataagatatattggccgagtgcggtggctcacgcctgtaatcccagcactttgggaggccgaggcaggttgatcacttgaggtcaggagttcaagaccagcctggccaatatggcaaaacccccgtctctactaaaaaatacaaaaattagctgggtgtggtggcacacgcctgtaacccagctactgaggaggctgaggcaagagaattgcttgaacctgggaggcagaggctgcagtgagccaagatcaaaccattgcactccagccttggcaacagagtgagactcaaaaaaaaaatatgttattcatacctccagccccccatctagcacggggcccagtgcatagtaggtgctcaataaaagcatgttgaatggatgcatgcccagatgaacagaagtggatgaaggatgggtgggtgggagggtcagtggtagatgggtaaatagacgcagctcttaaactattagttctcttttcttttttttttttgagatggagtctcgctcttttgcccaggctggactgcagtggcgctatctctgctcactgcaacctccgcctcccgggttcatgccattctcctgcctcagcctcccgagtagctgggactacaggtgcccgccaccacgcccagctaattttttgtatttttagtagagatgggatttcaccgtgttagccaggatggtctcgatctcctgacctcggatctgcccgcctcagcctcccaaagtgctgggattacaggtgtgagccaccgcccccggcctattagttctcttttcttacagatatatggattccccgaaaagaaattacttgagacaaagacggcagacccggaattagacacaatgagtctggggggctatgttattctgagggagatgtccaataagcagttaaatttgtagttgtacccggtgggaattttattctactgctaataacaaaacctaattagaattttttgactccataaagccccaccttgatatcaagaatatcagggtcaaggtcactgtgatttcctcatggtcccaaaatgcttttggggaaagtgaccttcaaccatcctgttcatgttccagggaggaaaaagaggggcaaaagaaggagtcagcttcctataaaaagcctgttcctggaaaccccaccagatgacagctccagtatctccaaagcaacccgtcactgcagaggaggctgggagaattggcctctgagctgggcacattgctcccccaggtaatattgggggctattagtaaggaaatggaaaaagaggaggctactagcagtttttgccacatgggtgaagaatccagggagagagctggctggaggatggagatggcaggaaagcgagttccaggagtggcataagccaaagcagaagggtgaaagttaatggctcttttagttcctcataagctctgcaggctccagtctcaagatgcatcctgaatggggccacttctccagtctcagcctgctccaagccacgtgatctttcactggatggctgcagacccctagctcctggtctccctgcttcccctcctacccactactcagtgccccattctctgccccacagccaaagggatccttctaattgagaaatctgaatgcatcacgcctgactcagaacccttccgtagcatcccaccttgctgggaatacaatcccgagtcctcaccaaagccagaccttacatcatgtgtggtccatgcgcctctctgtcttctcccttcgctggtcactttgttccagccaccttggcctcattgttccttcttaccccagagcccttagacttgctgttccctctgcctgcaatgaatctgactcaaatcttcgcatggcagctcctttgcccactttatgttgctgatcaaataccacctccccggagaggcttccttgaccactccagctaaaaacccgcccctcctccccatccatctccactccaggagttaatgcatctggggccatggaccccttggccctggtgaagcccttctcagaataatgattttaaaggcatagacgaaaatacatagatttatcaaggcagccaattatatagaaatcgttttcaaaatatttacaaaacaaatgagtgatacagtactagatgcacttctttattaatgcattaaataacaagatctcgtggcagttctattaaccacaacaattttgaagcagtgatgagtgtcaatgatgtttcaaaatgtatgcaacaactgtaatgtgataggaaatatctgatttctgttggtgacaaagtcacaggcactgctaatactaccgtggtatgttgccaacatttataattgaagaaaaatgcgatattttagttacaggttagtgagataaaaatataatttttttcctcctctaacttcactgaccccctgaattctatctctagatgccttggggcagggggagggtctggttcttttttttttttttttataagtccctttcactacccaacatcatacatttattcgtcaacttgctttctgtcaatttttcccagaagagcagagattttatctgttctgttctctgctgtattttcaggacctagaacatctgccaggcacatagttgatcaacaaatattttttaaataaatgaataagcaatagaggaggctggaaagacagggaggcttgaggcagatgcgaggggccttgaaagccaagcacaggagctcggctgtgactggtggtgatggactcaccctgggaggggacgccagcctgggagaggtcactgtgcccagggcagccaggctaataggtggcgtgactgggggcgtgagcagactggctgtgaccaccttccaaaggcagctttcagagggaggcccaggcacacacgagtccctgcatcagctgtggatgtcggcagccactccactccctgctctccccgctcctcctctggtcccttggaggtcaagcagaaacttggagaagccaggcttacagccctgtcatcattcttcagcgtttcccaggcagtaatagtgtgccaggcaccaagggcagggcccacggggctctggggaaggagagccccagaggtcatgatgcaccgcggggacgtctccacggcagctattgcagacagacccagtgtgttggacccaggagccacaggtcacccctccccaactggggctggatattcagggccacgaaggagaagccagggaaatagccagcttctgggatcagacccacttgggtggaatttcagcttggctgcttgtttactaattgcatgcggttgagcaggtcacataaccactccaagccttggtctccttttttttttcctcgagacagggtgtcactctgtctcccatgctagagtgcagtggcgcaatcttgacccactgcagcctcaacttccagggcttaagcgatccttccactcagcctcccaggtagctgggactacaggcatgcaccaccaggcctgcctaattttgtagctttttgtagagccagggtctccctatgttgcccaggccggtctataactcctggactcaagtgatcctcctacctgagctttccaaagcactgggattacaggtgtgagccaccgcgcccagctcagtgtccctttctaaaatgagagtggttttttctacatcatagattttgggtgaggatttaatgtgggaaaataacagatctaaagcagccagctcaatgccagatgcatggtagatgctcaacaaatggttgcccttgtccttgtgaaaatagcaaaatgacttgacaaggaggccagtagtcctctgaagccagcatccctgcataacctgcctcaacaccctgcccaaaacggagtagggggagaataaggtggtaacctgggagccaataagctgggaatgaagagaaaagacatgttttggaaccatgtctggattcaaatcccaagctctgcagtttacagctgtgtgacctcaggtaaaccacatcacctctctgaacctcacttttctttttcataaaacaaaggtaatcccttcttctcacagtgctgtgagggttactggacaagtgtgcacagaatgtgtgaaagacctctgggacaggccctgacccgaggtcagcactcagtcaacagcagcttggaatacgtgatcacagcccagcccagagagggaaccaaggaggatacagatcataggattaatcccttgcatttgtcaagtgtttcacactgtggaaggagcactcactcacaaccgtcttggcatctgagcctcacttcagcactttaggaatgagaggatggagagtttttaacttttaagttcaggggttacaagtgcagatttgttgtataggtaaacccatgtcttgagggtttgttgtacagattattttgtcacccagatactaagcctagcacctattagttattttcccctgctcctgtccctcctcccaccctccaccctccaacaggccccagtatgtgttgttccccctttgggtccatgtgttctcatcatttagctcccacttgtaagtaagaacatgcagtatttggttttctggtcctgcgttagtctgctaaggatgatggccttcagttccatccgtatctctgcaaaggacatgatctcgttccttttttatggctgaagtaccgagagtttaattttttttttttttttttttgagacggagtttcactctgctgctcaggctggagtgcagtggagcgatcttggctcactgcaacctccgtctcccgggttcaagcgattctcctgcctcagcctcccaaggagctaggattacaagtgtgcaccaccatgcccggctaatttttgtatttttagtagagacggagtttcaccatgttggccaggctagtttcgaactcctgacctcaggtgattcacccgccttggcctcccaaagtgctgggattacaggcgtgagccaccatatctggtccttgatctacatttgacaaaagagacacagagctgtggtggcactggactctcagaagcaatctgctcaaaggtcaccagccagtaaggtttggggcaggatatgaagccaattatctcctttcctgtctcttttcaaaatagacactcattcattcactcaagagatggtcccaagctaagccccagggaactggcaataaataaggtagacatagcacctgccctcaaggaacttcgagtcccgtggactcaggatgctccccccacacttcaccgatttgaagggagacctatttttgctagattttccttcaaagaaggaaggcaagatctagcagtcttgcccactcgcaatcttgcatcacttgcccaaggtcactcagcatcagatctagatgacagatagggaagtgccttgagtctagagttatggccaggaataggagcgttctctgtccttggggatgacatccactcactaataagcccagagatagacactaggatcccaggatgaataagagtcctaaaatgaaggattccacagccaaatgcactgggaaaagctacaccatctccacccctccctgcaagtctgctgctcctgaacacactgtaggctctctgaaaatttctacagaaagaaaccacttaactcgatgtttctcaaatgtacttgaccatgtgaacctttttttccagccacacctactgaatttggagtatgataggcagaggaaagaacacaggctctggatgggatcaaactgtcaagatattaaaacacagaggagggaaggtcacttgcccaggtcactcagcatcagatctagagcctgggtctccatgctgttgctaacatgagaagatccttaaggatattctgcctggcctcctctctcagagaggtggccctgacaacctgctatgtggtagttcattctggagctgctgattccttcctagcctttgtgcaaattaaaagaaggtaccaccttcttctgggccaacaaaatcccatgtcagagcacatggattgcaaaagtgtagtatgggctggatttcagcccccacttgcccccttagccaagcaccctggtgcaggacacaacctgtgcaactgtacatggccacgcttattagccctttcctcattcctcctcactcattctacccttggccacttcacgtgaggggcgccctcccctcagtgctgggctgaggctggtgtgggaacagcccagttgttggggctgtacttccaaaccccaaagcagcatcagccaaaggtgctgactcagcaaaccttaatttatctcacaggccaggggtgcgcgtgaagcaattagtgaaataatggttatgtcgcactaaaaattatttatagagtcaccgtgcacacagctgtgattaaattagacaaccagggggactttaactgctggcggaaccagcatcccaggcccgggctgcagctggctgggggtggggcagggtcatgcttctggtctgctcacccactccaggcagctgagccaaccctgacccaggccaggacatagggggtctacctgggcaggggtcttgggaggaatccctgtcccagagagtctgcgctgccaggagccctgaaaataaacaagtagggggctttcacacattcaaggctgagcggcaggaagtttgttcacgtggagccttccgcagcccttcacgagtgaaagagacgtggactgagaaccagaaaaggtggtcccggagctccgcgggcttggtgttgactccaacagtggcccccgagagcccagatcccagctggaaaccatagatcggtgaagccctctcattttacagttggtgaaacaaaaggccagggatttcctctctcttgttcctccagcagacatcaggagacctttgatccagctgggatcctggatgaactctttcccctctctggacctcagtgtatccccctgaaaagtaaagtgttgcacaggcaacagatattgatcaagcacctattgccaactggatactgttctgtgtttatatttattgccttattcaagtttgcttatattcttctttagctcctcacaacattcctataaagtacgtattattgttgccactttacagatggagaatctgaggttcagagaggtgaagatatttgcccacagtcacacagcaagtgaggcagagccgtttttctaaaggcccatcagactgtaatgatagaacattgtggtacactgggctgagatgctgcaaaacgaaaacagaacttcctttgcaccggcttctgggcaggacacttgagatgcctcatttcatttcattagcagcccctcaggggtagatgtggaagctgagtcacagagtggttcaagccccctgtgattggcagggcttatttttatcagcaagacctgagctaaggagctccaaaggggttgcaaatggagctgcccacaggggcccagcaagtaccaaaaacagacctggatggtggctgtggccatctggactcccttgcaagctctgccttcaaatccatctgttaccatgatgcagccccaagttcaggccacccacgtctagagcacaaacctttgcccaaagaccagagctacctgtgtgatttcaggattctccctgggagctgatggtaccagctgctccgagaagtggcagccgggcggagagtgtgggtggcagtcaggaagccctcagggcactggcttctggcctggctcatctgccaaacctgggccctgcaagcctggcactcccatctaagctaaagatagtttcagaccatttcacaagagtcgcaagcccaatcacctttttacagccagggcatcttcttgcacctccctggccctgcctctaaacaagcccctagaggctcagaggagtggagtgactgggcagggcctcgaggctcaaggctcccccagccccctcccctcccctcttccagcaccttccccgatgcctccctcatgctctgctgtgaacaggcgggtccctctctccaatcacaattctgctggcaaaggggatgaagcttgctctccagatgcctcctgcccagtggcatctgatccaggaccctacaggaggagggctagagggggagaggccagaggattgggaggagctggctgaccctggcgccctatctcccagcaggtatttcccggggagtaacctcttaccccacaagacgcatcctccccctccttattcccctgcccctgcccaacatggctcctcattcaaaccagggctggcctctaggtgctcccaggtatgcgtggggcctgggtcggccctgagtcccgctgctgcctctggccacttagcatgcagtccttgtttgcgactgcagcaaccaaatgagattagcttgcctgctccagcaggtccccacttgccaccacccacggccctgcacagccaccagctgttctgggagcctcccacagccccagcctgccatctcacccccatcacagttgggccagtgaggggaaggtagggagagggtaaacaatcctgcccggctttgtagcccccagatccaccaccgctccccaccaggccttctggagtcagcagttgggggtagggatgcagagggagacaaacaggattcgggatccatccttgcttgtattcctggtcagttctcctcatgcctgtaatcccagcactctgggaggcgcaggcaggaggatcacttgaagccaagactttgatcttgaggccaggagtttgagatcagcctgcacaacacagtgggacctcgtctctacaaagtttaaaaattagccaggcgaggtggcacgtgcctgtaattccagctacttgggaggctgaggctggaggattacttgagcctgggaggtcaaggctgcagtaagctgtgatcacaccactgcactccagctagggcgacagagcaacaccttgtctcaataaaacaaaaaggaaaaaccaaaacaaacaaagaaaacttcctggtggggagcaaatcaggagggcctggctggcttcacctagactgcccctcctgttgaatccccagcccagctgccctccctcctctgcccctgcgggccacaggggagccagcagaagggcctggctcagcccgaggcctccctgcaaccctcccagccagtgaagggtgtggctggaaaaggggcccagtccagcccaaggagtgtccagggcctgtgcaggagactggcaggaagaaagttttcaagaaagctgagctccaaaccaggcgaccggagaggcgagaaacccctttgatgtcaggactcaggtgtaggtgtctcgtagaggattcccgtgttcctgctgacagtcacagctgcctccctgactgtggtcctggctcgcctgtgtcctccagcagcttctttctctgaccaccatgcccccatccctcccaggtctgtatcccacagaccccctgcccagacagcactaaaatcctctcgaggccaccccgaggctcctttcctagctgggctcccaccgagctgctgcccggcacacacctctcctcacctctcctcatactccctgcctgtctccttcccctccttcccctactcccccgaccttcgaagcccaggctgcggctcccgcactgcaccctcacctcacacttcagccctgcacacatcaacttgcgcttctctctacacgcacttgctgtgtagcttcgggcaaatcactgaaccactttgagcctcactttccccatctgtaaaatgggagtgatccctacttctctcaagggcagatgtatggctcaaattagatcacagctgtgcatgtccatctgaatttagaacagtccgagggattattcatcgggtttgacggcttctcctgggcttgtagatttcggcatgggtctttgtcccggccacacagatgctgctcagcatggttcatttggagcagacatggccccttccatagtggacagggatcccttccagcctctggccacaggcagatgaagggagctgctgcatgcaaaggcaggagggtgtggattaggagccatcacgggaaatggctttcttatcacgacacaaccgggattgccagggccaactctggaaattgaattgctcccccactccatgccccctcaatacctcttccctctgcttcctgctccctccctagccccatcccccatgacagggagagacccagagacagcgatgcaggacagagcaagtagagggggcagtgggggtgctcagagactgaggcagagattggggcaccaggaggcaagggcaggtttggcaaaatgccaaaggcagggcagggatggggccacagagggggccactcaggaattcagtagacagggggtgccaccctccccgtggaattccccaccaccccacacccgccaggccagagctttggccagccaggttggtgtcatctcctctctgttggcccctctccagctcccaccttggcgcctctgcagggcccgggaaggaccctgatggccagggcagaaccctgggctggcgcccacgggtgcttggatgtagtcccagtgagttcctggcagagccagtctgcaggtggtggggagcaggcccagtggccgggggcagccagctgtgtaatcaggcgggttctcaccacagccagcccaagggaggaggcgcacagggaggggcagagggggggcccagcccacctgcctccagctcccctggcagcccaacctagagtctctcggggtaaactcagagtccaggaggctcaggaggagctgccggaggctgtgcggaggcctaggaccccatgagtagacctccagccagcccagcccccaggccagatgcaaaatcaggagctaaagggtgctgcctcccagcctggcatggtcctgcctccccttcccaacccagcatcttggtgtatagcctaaaagtctcagaccctctcatgaactgacccctgccgtcagcctttagactctcagcccagaagtagccccttcccttagacccctctcttctcagccccagctcacccatctcccaccatgtgcccatccatgactagcctggtgctcaggagccgcagcagccagggagcccggcatgggggcactgcagccccaggaccacgtggcttcttctctactcagcccaccctgcccaaacacataaactctctctctctctctctcactcattcacaatgtattgctgaatctcaagttcatatgttatgagctccagggacctcttaattcaacctccatttacaggtggggaaaccgaagcccaagacagaatggacttgtccaaagtcacctgacaagggaatccctctaagccccagccagcccttccctccaagggtgccctcccctgggagtccccctctggcctcaggactctctctgcccagactttgtgggttctcctggcctctgcactcacctgcacctcccagacctggccaattgcagggccccaaagttaataaatcaaggtgactttggggacaagattcagcctctttctcccttgtccctcccatttgcataatcctggctggcaatatgataatgatgtttgttaaagacagagcacaataaattaataccgttaagttgttgctgcaaaatgcaaagcaggtaatttactgccagcgaggaacggagcctttaaactgtaatggattaactttcccagcagcaaatatgtcccccgagggagggaggcaggtgggtgggctgggttgatgataggggggcctgcctgcttcccagggttgggccaagtgtccaagccaagatcttaggcctgcacctatgtcagcccctctccattgtacataaggggaaactgagtcttgtgcaagacagggagctatggaaggccacagcagggctgtggtggtgacctgcgggctttgtatgacagcccattaccctctagaggagggggctgcagatgcctcatttgcacacctactctggaacgctcaggaggagctcctgttacagaccctgaacctcctcttccttgagggggactagtgatgtcctccccagaatcccccaggcccaagagaggcctcagctgcagagtcagtcctagcccaaggagggaaggatcctgggttttgttaggactgagaggaggggagtgggaaggggaagcgggggcgtgccaagaatggggttagaccttgccctgatgccctcggatactgggagggaggggctgtggaaggaggagaggaatgggtctctcgagaggaaaggtgaattctatggttgacggggaggggagtgggatggcggcagcggggaaggtgggtgggcaatgggaggctgggagtaggagcggctggcaggcctaaggagaaacccaggcactggcccagggcccctcaggggcacctcctccactggggctcagacagctccttgggtccctaggagaattgccgcagccccagcccagggcgggccggcaggcgggtctcagggaccccagcggaattctaatttctcatttatctctgcagcttctcctgcgatattaaaggggcgatgctctgcagttggctcccaggctaattggatttgggcctcctctcactccctggtgagggagggggatgtggcagccttgatgggggaggggatgtttgaggacttgggctgaggctgtggtccaaggccagactcctaggctacagtcctgaccatcatgtggccttcccaagcctctgcccctctccaggccccgcattccctcacctgagatgatgataatgatattaataatattagtaataaaaacaacaaccatgatttgcatagcatttcctagacatagacactgttcttagtgctattcaggacagcactcctcaccccctcatcctaacaacagcccagtgcattaagtatgattacgttcattgcacagacgagtaaactgaggcatggaggggttaagtaagttgctcagagtccagacagcacccacagtgaatgtctttcaggtttgtgaggggcctagaatcccaactttaaaaaccccgttacgctcaaataggcctaaggtgggggtgttactgcctgcacccatttcaccgatggggaaactgaggtctgacccagacatatttttagctttaattttctgtagctcccaccaagggctcccttccttctcctccaccccagggcccagggcgtttccagggtagaaggctggggcttcagagggcgcattcagtgcaagtgtctgaggtggggcaggggaacttgctcccaacacctgcctttcctccatcggccctgcctttctccttctctgagcggaggcctctgtcccagcatcctccaggcctgctggggtcccttgtcccacactgctcacctggagggaggacctcacctccttagcacaaattaattcccacatgtgccccagatgcaaaccacacagctctgcaagtccacagtggaataatggagaggggaggaggccgtacatggaagcctgtttcccagtgaccctagagaccggccctttacgcatgttgcctcatgtcatcttcatgatagacatggctccaatgcccattttacaaagaaacagaggctcccgtggaatgtttcaggccaggccacacggcaaggacctgattgagctgagattcaaacccaggtttatcttgatccagaacctgagctctggatacatcctcctgtgcaagagagaagttgagactcctttggaagttcagtatcagagggcctggaactggaacccaggatgactacagtggaaggagccctgcactgggaaccggtagacctgggtttcgatgtctacctggccccaaactcactgtgtagtcctgggtgagtcacttggcttctctgagctcaaaggcaaaatgcagaaaccaccgtgcctaccttatggggctattgtaagtattacaggaagtacaagtaaagcacttatcacagtgcctgacacgtaataggtactcaacccaggctagccatcattctgtggatgtattcatgctcacctcccaagactgctgggatagcacccgggcagagctttgttctgtgtcatggtctcagagattgccagagctagaagcattgagcacaatacccttgtctttcaaatggggaaactgaggcaaagggtttcaacaagtgagtggcagggcaaggactcagctccaagtgccctggtggcctccctgctcagcaaagatgacagttctccttccagtctccttttgccctgggtgtctgcatctgtctgtccaggcgtccctccctgagaggccagctggatggctgacccctgcagctctttccagtccagccgctggcaggaaccagccagaataaatgcaaagagaccccctctggaggctgttcttgccgtgtcccccgtccaaatgttaattttgccagggccttgataaatcttcctgtcgtctccatccgctggagacatagatttcatcttattgaaaggtgacactactgccctttggtaccagctatcaatttcaggtggcaatcagagtggagagcaacaaagaatcaggccccattaactccccttctgccaccgaatcctacctttaaatcttttggggccatcctacttgagatgtctgcttcacctgcccttccaaaaaggtgtcaggacctcatctttagcctttcagggcatgcctggttgagttcctttctcaggcctccagagccactttgcttcccagtgggcagactgaaagagtcaggaaattaatgtccagctcttaactgatgactatttgaagccagagtataagtaccccagctcctccctcaccctttgctggggaatgggagtggattgctctgtgatgtgagtcctattctccctcccagaattccccagcagagttgagctccagttgcccacagtagtaacaggcttgataaagcacccggtattggttgcctgcctttcctgtatcactttcccactgtcctactggtgcttcctgggatcatttcccaaataaattacttgcccttgaatccatttctcagggtctactctggaacccaaactgtgggaacactgaagattttttagcatctcaagatggaatgcactccactcagcagtggagatacaagaggcctgacgtgtattgattgcccacgacatggcaggaatcatgtgttttggctgctagatcagtttttcattcatgctgccagacagctctgggaggacttgccccagttttacagatgaagaaacatgctcagagaggtgaagcgacttacccaaggccacacagccagcaaacaaaagtcaatatccaaacccagggagcacactgtcttatccactccattctaccacctctagacaggggcatgaaatggagccagggctcacttccaggtacaatcagcagtgcagatgggtaaatttctcctgagggcatactatgaggcaggcagccttctgcaaggtgctaaggacagcgcaatgaaaagacgcagttcctgttctcaaaggggctggaagtggtgggggagatagacctgtgaaagactgtatggctgggacctctctcagagtgcactgcagcctcttccctgcaaaatcccatcttacaatcatgggacattcctgcagggggcagctgagaggttgtctatttcaacacattattatatggaggccaccgaggtctcaagagaggcattcacccacagttgtactccatggccagggctcttgtgtttgaactcagctgaggatttctgcaacagagccacaggattcctcaggctcacaagcaattctgaaaactcagaagtctctaaattaaaacaaaaaacaaacaaacaaaaaaacaccttgcaacataaaacatttaaacttctatatgccctaaggaaaacttaataattatacagacttaaaatatttgcatatcacaggtaaagggttaatacccttaatatacaaagagcttttgccaatcaataagagaaaaacaaccagaaaaatggacaaaagatagcagcagaagatgcctgtgtaaggcgttaatgcaagacctctggacttccgaggatccggagggtggtaaaactgttattacttgttaaataaatgcttattcattattaaaaaatccatttggactgcgggtcgcatgctactgcttgttaaatctgttaaagtgctgggaggactcccagatgccttatttacagttacgatgacagagaaaagtggccgaatgccagagccacaagcctgttgtgggatccacttcttgctccctctgcctgtcctgtgcctgtggtccctcagtcccaaacaaagtggccttagagccaaattgcccctgcagcctgggtaaggctgactaaagaggagtttggccaagggtcagaatgcataggctcggatcccttatgtgacctccactcccatctctataaatcagtttccccatctataaaatgggtaggttggcaccaccgatattggaggtcactgccacaccgacaggctagcattccagggtggggggtgggggtgtaggcagtggtgggaggagatttggcacctactaccctgtccccacctttacacctagggcaacggctgacctcattgactggaactcaagtaaggagcccttttaagcaacaaagatttcaccttacagatgaaaagtcagaagcccagagaagagcgggcacccacttaaagttgcccagccctgtcaggaccagagcctgggactcaggttccttcccttcctccttagaagggaagcagagaggccagaggcagatccagagcctggattttgccgttgctgggaagctttctctgcctccttgcactcagcgccgcctctctcctccttgactccatggagaccccccaccctcagggccagaggcaccttgcagcaggcgaaacttgtcagcccagcagggtccttctggtcctcccagccagccagactcctcatctctgctctgaagacagcctctggccatgagtgagcaatgctgtgctccacgtgctccacgccacctgatgctcgctgttggagacacgtccttccaggtgaagcatggccctgtcagggagtcactgggaggggcacccgagtagcagggaacacctgctgtctttccttaccctgggttttatgtcccttatcttttgaccctccttccattgctgcccggggtagaggggtcggtgtgtgccccgtgacggcaagggggagaccaggatttggggccaattctgccacttgctgtgtgactctaggcaagccacgtcacctctctgagtctctccataaccagggctgttttaaggaaacaattagataataaatgaaagatattagcacggtgcctaggacctaggcagaggtcgataaagagtagctcttattgttatctgaaaaatgggattaataatatctagcctaggactcttggaagggataatgacataatgcatctgaaacatatggcaacatggcaggggctccttcagtgaccatgctggggtgaggtgactccgaaacagggacattcagctcattttagggcaaggggcctattctcgtggctccaaatgctcaccagggtcatggccccctcatcagctcccacttggggctgactctggccccagccagccttagggtgttgtccaagctggagatgccagcctcgagggtgggtgggagccagggacccaggaagacacacatgatcaatactaagccaatctcttacaagattcccccggcctctggtatccaattgtaaagaaaatcactccgcacactagggagatgtgaaaaatgccgcagattacagtttgggatgttctgagtcagagtgagtgagtccgggattgtttcctgcagtaaataattcattcactttaaatttcgtggtttttttttctcaccagctccctccccgccacctctgtctcactgcctctcctgccagctccctctcaagtccactctccacccgggaggctcccatccctacctaggtccaggcaaccccaaaccaccaaggagctaataatacaaatgttttgagtctgttaatgacactaatcgtcttttgctgctaattagtaatgctgccaaggaacacttccttgttaatgaggccaagggccacccaggcaggaaagcctagttgggaaaggttgcaactgagctgggagccaggcaggagccaggcaggcgggcaccaaggaggcctctggcaagaccaagggcagtctggctggtgatggctcctactccggaccctgtcctctgcctcacatgctacatcacccagagaggatggcttgagtgggaggctggaacccggccagggggcaggtgagtggaggccagggaaagagatctggctagcggtggccccttcactcccatcatagacactgccaggccccagatcaaaagcatggaacaactccaatctgagtgccagttctaagacccatggctcaaatatgctaatggtgggcacctatgtggaatctcttagtacacagtaatggaatgtctggcagataactgttcaacaagtagaccctggggaggtgctgggcccccaaacgcagatcagattctgccttgatctccaggaactcctggcttggtggagggagacagacaataatggccaacatttattgatcacttactatgtgctgggcactgagccaagaactcatgcccactgcttcatttattcctccccaaatccccatgaggtgggtatttgagtggtttggagcgtttttgtttgtttttatttttctgataggtactctttctatttccattgtacagatgagaaatagaaggcccagaaaggtcaaataactggtccaagagtgcagtacagcagaatcagtatgtgaattcaggcacctggatctaaagccagctctttgaacccaagccctttaacagagaagtaagaagacggtttcaattcagtgtgctctagtctgcaataggagaggtttgggggttgtagtcctgggtgatgagtgaggcttccaggagggggtgaggtctgggtcttgaggggtgcataggagttagctgggggaagtaggagggaaagtagaaaggaattccaaaagatggggcactgtgagcaaagcagggcagcactcaggtggtctagcgatatctgagggtaaggagtgcagtgagaacagggagatatcatgctggggagcccaggagaggggatggaactgcactgagggccatgaagatctgtacatggagagccccagagaagacctgacttcaggatgctctctctggactacaggataaagggaattgtgtgagagagagacaagggagactggtgataaagcaggaaagggctggccagggattgtgcttgggccatgtgctactgggatggaaggggagcaagcaaaaggtgatggattgaaggtggaagcaggatggaggagtccaggaaggccacagcagcctcccaggcagatgcaaggagggccacctttcttctccgactcagggaaccacgctaggcctctcgggatggggacacagcctgcctattcaatcccagcttgagttgcagggggcccagacaccagaagctgataaggcaaggagtgtccccagcctgaaaggacccctggccaactacatcttctcccatggcaactaaaacccactatttcaatttcattcccttggattaagtgttgcctgttctctggtagggagatcatattatgccatgaactcttcgtagacagcattgaggactcaaattacatatcattgttttcaggggcagctttctggggttcccctagacagaataaattgttccttcctctgtggtcccagagtgcctcatatgtatgcacagccctgatgatactggagtaaggatttttctgtctgtcttctgcattaacctgggagctcctggagcaagataatggagcaagatcacaagagatcctttgttttatatgtgttcttgcaaatgagcatgattttgtataaatgcaatttttcgtatgtatctcccctcctagactatgagccctctgaaagtggtcacttgtcttattttatattgttttattttatttcaattatcacaaagtaacattgactttctttgggcgcatagttctataaatttcaacacacatataaattcatataagcaccatctgaatgcacatttaattcaaatagatggtattatgccatagatcccagttggttcctcgctcctttcatctcatgttttaaagatccgtccatggccatctctacacttgtctaacagttgccaggacctctgcagggtgtgtctcccatgtcttcctgtccgctcccccagggaggagaggtgggttgcctccaactcccctcaacacagcatgggcacaagaatcctcagacttgttcctcccagtcatgctgagaatttcactgaaatttacacccaggagcagaatctctgggacatagggtcagcatataaataatgatctctaaatgccacgtcactcacaaaagtgtcctggcccatcttggaggatgacccatgacaggctaggtggagccagcacacgtcactagggctgtgccaggtgttcaaatgctgacatctttccattctgatgggcaaataggtggttgcctgtgtagagtttcccaagggctcagcccacctccttgacacccagctctgccccagaacacctgactcttcccaggatccagcaactaatgggttacaagtggcccagcagggcctccagggtcttgctccaatggccattattaactgttacacattcgaatatcgtccttgtccatgccctgtgcaggggaacaaggcagagaggagctcagaggttgaggttcaagtcttcttcagcaggtcttggcaagccccctccccttgctggattcccacaacacgagatcagcacttgccagactttcctgaaacatgcttccatagcctcttagccactctgggagctgggaagtggttctcctcatttgacagaggaagaaagaagaaacaggcccagagagcggaggtgactcgcccaaggtcacccagtgagcaaggaacagagctgtgacccaagagattgaaccccagcacactcctgctttgaaggtccccgtgccacaccacagcacatgcataaaatgcaccgactcccacttcagacctctcctatgcatgagtagaggaggggtgaacagaattggcactgactagttggcacaatgctagattttgtagacatttaattaaacacttactaattttgattttgcagttttctttttgtattttggagcttatcttttcttttttccttttcacatcttgaacttttccataggcccttgacaactgcctgaatgctgcctgcagtactgggccaatctgtctctctgtctcagtcttgggacttttggacacccctaggctgtggccaatctggggagaagggagcacagaggtcagttagctgaggtgctccccttaaggactccaggtctgcctctgagactcaacatccccaaagaagaaggtttcccaacgcaggaggtccgtgctctggcacattccaggagctcagcacagagagagtctcaggcccaacagctggggtgggaacagcgcattcatgggggaggctggaagttattggtgaatgtttttaaaaggtggggaggtggggaaaagtggggacctggaatgccaggattccaggcttagagacttggtccaaattaataatggcgccaacgatacctacctctgttaagcacctactggatgccaagcaccatactcttatcttgtttaatcttcatgacatctgtgggatgcaagcagggcagataaacaaaatatttaaccctcagttcagcacgtaggatcaatcagaaccactgaggctgcagcaggtcctcacggccgccagaggagtcaacctttagtttttggaccttggcaagaggaggtgtccgtaggtgaaatgggagcaggagagaacatttggtccatgggctggccaggacaaaagtattgcaatatttttttgtgtgtgacagagtctcgctctgtcacccaggctggagtgcagtggcatgatcttggctcactgcagcctctgtctcctgggttcaagagattctcctgcttaagcctcctgagtagctgggattacaggtgcctgccacgatgcctggctttttttttttttttaatttttagtagagacggggtttcaccatgttggccaggctggtctcaaaatcctgacctcaaatgatctgctcgcctcggcctcccaaagtgctgggtttaaaggcatgagccaccatgcccggccccatactgcaatattttaacaagcccggctgaatattgcttcaggtcataggcactactaccacctgctccattttacagtcaaagaaactgaggctcagagaggtgccaccctagtggggaggtgctacctgaattcaaacctaggctgggctcactccagggcctgcaccttgaaccattaggcttctgatgtttagctaccttgtcccagtcccaggcactcacattctggctactttctcttctccacaaaggtttccctgcagttgccagactcaaaggaccaacggcagctcagacagaaggaagggaagggttaattgggccacagcccagggcaggcacagcaccgctcttgggcatggcagcctctggcacctgccctggcctttcatctccacaggctccaggtgagagaagccagagccagacctgccagggacccagcagcgtggcttccctttgattcccgtggagcccagaatcaaaagcaggcggcagtggccagtgccccagggtccccccggatggcagccccatgtgcccttttcccttaaccaccagcctggcctgagcctctgcaaggtgaggctggtggggggcccaacctgccggattctcaggggacaggccagagccagagaggggctgagggaggttccagagcagaggggaaggagagacagcagtgcaaggcatgggctcaggcccaggaccagctgtggggcacggggggagttccaggaggctggaggaggaagagagtgggctcagaaaagcacagagcttggccatggcccttcccggaggcacccctcgtggggttcaggtcgcgaggtgagagctgcggggggccggtgagaaaaagcagcaaatttaaaaggaattagtcaggaggaggtgacaggcccgttctgaagcaagatgaatgggtttcagttggcgaaaatgattctaatttataatctgcttcttgctgccgctcgccaattaattctctatagatacataaataggccgcatgtttgctttgcttcaaacgtaataaacattacactctgtccccttcttttgtgccggttcctgtcacggcattagtccccacagctaattcctcacacctgtctttgccgctcaagggagcggggctgagtggggaggaagtgcccagctccaggaaactcgaggcaccaggagataaattgctgatccaaaagctgccgacacccacagcgagcccgggctccccactcaggagacgcccaggcggcgagggagggagggaggcacaggggagtccctccatcttccttttgagactcctgtgtcacactctttgggaccatcttcctaatcctaatgagagatggagggaggggaaggatgccttgtcccatctgtggcctcagcccactgggttccagacacaccaggcccattctgcttccagcttttgcacttgccattccctctaccctagggagccacctcctttatgtctttttttttttctgagatgagagtctcactctgccgcccaggctggagtacagtggtggaatctctgcctcttgggttcaagcgattctcctgccacagcgccccgagtagctgggattataggcacacgccaccatgcctggctaattttgtatttttatagagacagggtttcaccatgttggccaagctggtctcgaactcctgacctcaatgtgactcacctgcctcggccttccaaagtgctgggattacaggtgtgagccaccacacctggcattctttgcatctttctttatgtttccccttcccagtgagttatttccctgactcccccgccacttcctaaaactgacaccccctcttcaactctccccgtgctcctttccagcttttaatttttccttggtaccatcaccctctgacattctatttattctgtgaatttatcttgtttattttcctccccaactgggatgtaggagcccatgagtcatccccacatttggtcctgtattctcagtgcttgccacatagtagatgctcattaatatttgttgaatgaatgaatgaggtggggagggggtgggagggagcagcagatgggacccacagattgaaatgacacctcactcctgcttgtcatctcatctgacccctgagagatggcaaaactgaggccaggggaggcgagacttgcccaaggtgacacagcgagttagtggcagggctggtactaggatcccagtccttggcctttctctaaggcagctcaggccaggaatacacctgccaaacatcctgccaggtgaggtgttgaggcaactgaaattcaggcaggtgacatgacttgcccaaggtcacactcatttagtcactgaaatgattgagtacctactatgtgccaggcaaggttctaggagatgaggatgtagcagcaatcaggacagaaaagatctctgccctcccagaactcacatcctagagagagaaatgggcattgggtgagttaataaataaatgtaaatgttaggaaggggtaacagctcagaagttaaagcagggtgaaaagattgggtgatgtcacagcaagatggaataggggtgaagtgccatttgccgtggggtggtcagggatgttctctgtaaacaggtaacagctgagcaggagcgccactgacaagaaggagacaaccttgcgagcacagagcaggaccgggatttccacttggatctgtctgctccaaagtgtgtatttttctccacgaaaaatgagcattcctggcagtaaggagcactatcgggtgaaggaagaagcactcagctctgagtgggtgaggtatgagttgaagtctgaagccttggtgagagagaacagacagcaagggatggagcagaggctgctcagccagagaccacatgggcaaaggcctggaggtggaaggcctggaggtaggaatgagaccttcaggcagaggtgagctggctctgggggaagcagggagcaagccctgatttgtattgtttatcatttcttttttgtggtgtaaatattctcaacctggccaatttcaagggcttgccaacctggcttgcaaaattcctggaaaaagactctaacaactggctttgataagccagcacaaaccagttccagcacatcactgcttcaggtgtcaacaagagaaaggccaggcagcatccacacagggaagacgcaagacagggcttggaaaattacgtgtggagcagagaatcctggaccccggaagggctcttggtcatcatgaaatcttcccccacctctcctcctttattttatgcaatagaaaacccaggccaagaaaagaaagaactagagacctgcccaaaacacagagagagttgaggtcggagccacagccggaagatcttaggcttctcaggatacctagcactttctccgtggcatccaactgcctgttcctaagaagtcgtcatctgtgatggccccatcaggcatgagagtcaagggctgtgctacccatgaggggcaggaggagggaagaaaacagggacatgtgttccaggtccagtggagtgcagaggtgggacagcttcatgccacctgctggattaatacttaagctggatttcaaaagataaataggagttttccagcaaaacaaaggaagagagggagctccaggtggcagggacaacattaaaaaagctcagagtggataaaagctaaaagagtttggcactaccagaatataaggtgcaagaaggaaacagctggagaggaagctggagaggcaatgccctgttcctcatgctgaagccataatggtgggctttcaggtagctgcagagaagctattcttagatgggtcctcctctcttgccagaacaacatgaatgaaatggtacggcaaagtccacttcctcatgggtgagaaccttcaggtgaaggaaggtccgggttccctggcatgttggccccagccctcctggtgctcagcaggtcactcggcccggggtgggtccctcgtcctcatccccttgcagatcccctttcccttcccactggcggctcttctctaggccaggaatagaacctcacatctgacaatcctcagcggtgtttaaatttaatgggcctttctgcttttttcctcctcagcacctgggctgggcgctctgcagcagccctggggagaggcaggtgaataattcagggagagtcggtgtttgaagtgtgtgtggggagtgtggtagggctgtctcaccccaccaccccagggaagggggctcaagagggaaggtccaagtgctcagtttctgctgtactctgctgtgtctttagggactttcagggaagctcaggggactcttattcccatctccacgcagccacctgcagtgtcaggcctcagggctgcagaagctgtctagggctgacaggtagggagagggaaaggagggaggcgcgtctttcccactggctttggatctgggtccaaagagagagagagagaagagacagagtgtgtgtaggagacagaaggttgggacctagccccagacagaggttacaggagcggggttagggagctgggatgtgggctgagatgtcatgcccagaagcagggcgggcccaccaggctgcgggagagcttccggtgtaaagctggatcctggcctgggccatagccactgtccatagtgctgccgttgtgcttaggccctggatggagtgccaagttcccaaggcttggaacttggcaggtgctgggctcctgtttttcccacctggccccaccccagcccaccacagacaaagtagcctttccattttctaaccttggcacctttccagcatttgcattcattcattcatgcatacctttaacaagtatttattgagcatctactatatgctgcattcggaggatagtgcagtgaacaaaacagactcagttcttaagctcctagaacttgtgttccatccctgcacccacttccttgaggaaaaagaggggaaaggagaggaaggagctggccttaaattcctgttcgtcccctgacttggtctgagtcgtccagcaagtcactttctccccttaaaccttggtttccccagcggtagcatggggacgataaccctgttttgtgagttgttgctgctattcttcttattaattacagcaaacacttattctaagtgccttacaaggatttgctcatccaatcttcaccatctctattttactataaggaaattgagatgtggagaggtgaagtcacttgcccagggtgacacagctggcaagtggcggtgatgggatttgaacccaggcagtctggctgcggggtctgcgaggattaacgccatgaggtggaggtgcttaagggcgcagcggcctcggcgcctgtggctcccgcaggctcgcccctccccgtcctggcgcccccagccaagggcggcctccccgtcccctcgaagttcccttcccatggagtcccctccccaagtagtcccctccccctccctgcggtcccgtcggccccggcggagaaagcgggctcgcagaggtgcagagcgcccggagtcccaggtggggcgccctcgttcgggtcccgggtccctctggggaggggctagggtgtgccccggctgctccctacgccccccggcgggctggcggccccgtccccgcgctgacatttctttggttgttcatgtcacggcccttcagtctgcgcagttttacaaatgtgctggcgagatgaaaggcgccgggaacagcgactggagaacaagttcggaaaagcttttaacttccagctcccacagacaaagcgggaggagggggaggaagggagggaagggaggggaagcacagagtggggagagtagaggaagggagcgggaggaggggagtgggaaggaaggagggaaggaggaagaggagaaggaagtgtggggagaagagagaaagggaaacggggcactgagagtgcgggatgaggacagagagaaccagaataggacaggcaagagggagacagagggagactgggtgccccgaagaaacagagatgggaagagacagagaaacagagagagggagacagacatggaggcagagagaacaggacagagggagggggaaacggaaagagaacgacagacgcagggacacagctaggagataagcagatggggggaggggagaagggtgctagagaagatgtaggggcaggtagcaagagactgacacccattcagaaacagtcagagagaccagagacactgagggggaggagacagagacaggagtggaggcagtcagagaagcgaggacagatggacagtgcatgagaaggcgacagacagataaagggatgacagagaagtgtagagaagaagaggaaaagagccagggagaatagcagagcctgaagctaagagcagcctccccatccccaacacacacgcgtgtatgcactcacacacacacacacacacacacacacacacacacacacacacccttcactgacccctgctcaaacctgcaggctccctggagcagaccctgctgttagggcgttcagactagagcagtggctctcaactgggggtgactttgcccttcaggagacatttggcaatgtcaggacacatttttagttgtcacaactggggagggggtgtgctgctggcatctagtgggtagaagctggggatgctactaagcatcctacatgggacatgcccaatgacgaagaattatctggcccaaatgtcaatagggccaaagtggagtgaccctgggctagagagagagaaatgcccatggacccagatgactactccaggggaaaacatgtcccctgtgccaagacagggctgtgtgcccttctgatggagtgggaaggagaattctcacaagcgcctcctcttggaatccttccctagccatgcctctctccccaagtccttcctcatcctacccaatccctggaggagtggtgtctctcttatttgtagactcaccacacgatataaaaaagcacacgttcaaactctaactacaaagcacttggcattttatttgcccagaggcaatattgcacaacagttcagtgtgcaggctttggccccagcctgccttggtttgaatcccagctctgccataaactaattgtgtgaccttgggcacgtttcatagttgcactgtgcctcagtttccccattatgaatttataaatttgttgaaagtaaaaggaaattatctgtgtaaaacatttaggagaaggcttgacacatggcacaggttcactaaatgttaactgttgttactatcatctcattttctcttcacatcaatgctgggggaagtggcttgcccatgtgtcacacagtctgcatggggcagaactgctctcagagcccaggcctgcccagttcttcctctgtcacactacactgcctcttgctgcccctgccacactgcagcaggagtcccagcttaccttctcccagaccagagtgagaggtctgacccaggcccaatgcgtcaacctgatctctctacttgccgtctgaatgatcttgctatttcaacaccgtgtctcagtttcctcatttgtaaaatgggctaatactagtatctgattattgtgaggacttaaaagcagaactatggcacacagcaagtgctcaataaacattcaatgtgttctcagagcctagccatagtgctcacaacagagtggacactcagagaaagtttgttgaaggaaggaagaattggaaataacggtagaatgagcctgaaaataggaaacattgggataggaaaacctgagggtctaataaagagtcatggggagctgggtgcagcagcacatgcctggtgtcccagttacttgagaggctgaggcagaatgatcacctgagtccaggaatccagcctggacaacatagtgagacccccatctcaaaaaaaaaataaaaataaaagagagagaagagagagaccagagcaaaagagaaagatgtgacaacagttcattcaataacatttattgagcacctactgtgtgcatgcagatgtgacagcaacagtgtcccaggccaaaacaacctgtggacaactaagtaggtctgactccagagatgaacagcacacaccagagcctggaggaagaggcaaagaaggaatgggaactggagcaaacagcaaaagtgagtcagagcgggaggagagaaccaaaagtgaagagatgcacctggaaggctggcctctggtctctgaaagcatgaaagagtggaggctaagaatagagaggagaggggaagagagagatggagaaaaggaaggcgatagaaaggcaaggctggaagagatcaatgaagggaaataaaccaagagaaggacgtaggggagggaacagactggcacagtggagaatacatctcaaaataaataaatgaatgatggagtttagtaggaggggccagaggggcagccagcaggagaggtgattccaatcatcagcaagacggactagggtgtggagatggagatggaaattggggaaggaggcgaggaggagagaaggataggggcgaggtagagctgggggtcctggagggccctgccccctctttgccatgaacttcagcagctgcttgtgggtgattaaatggctggtcattggcagcttggggggacagaggtctgcagctgtccagtctcctgttatccttcactcacctatctggaagccatggggaataggggggcgggcaactcctaaggggacctacaacccaagacaaagggtgggtctgtgggagtcactggtcctatcctaccatcaacgacctcatattgggaactcaggagtggggtgggagggtctcctccattaggcctcatcccagagagatgaagtagtaaggagagccaggcagccaggagaaagaaacagggccaggtggaaaaaacatcagggagcagaccagccggatttttaaaagaacggaaaacccaaccagcaaggagtttctgggcagtgggaagattttattgggagacttctccaggtcaaggtggcaccaagttaaggatggaggtgtcttgttttgcctgcttactttgttggttgcaaggatgtccagcgggactctccagaggaaaagcccacaagtttctctcccggggacacccgacctcccacctgcctggagactcagccctgggcacctggtcggtgtccacctcaatgcacagtgactgtttctgaactggcagatctggtctgtgcaaggtgcctttctgggcagcaagccggggcggccactgttcgagaagcctgctcctaccctggcctgcgcccctgctcctctgaaggcggcctcccgcagtagtcagggggcggaaatgggaagccctattcgcagtaaaatcaggtggggaaataggctctggtctcaaactgcggccacctggggagctgccaggcgaggaggtagatggtccccctcctgggggcgctcccttcgcgcggatctggggttggaggagggaggggcactgtcccctggggggtttcctgggactgggccgcccgagagagggaaaggctgtcccctcctggtgtaggaggggcgcgatccggggggcgggggctggggttccccggctgcgggggtccgggccggcggccgcctgcggcttggcgctgcgcggcgctcctgcccggcgggccctgcattctccgagtctccaccagaggctgcgggaggaaggaagggatccgtcccttgcacacttccccccagtcagacacgcacactccctcgctcccgctcgctcgctcactccctcgctctctcgctctctcgctctctcgctcacacacacgcgcgcacacgccgccgcggctccccctctcgctcccgctctccctccggctcctgcgggcggccgcggggctccggactcgcccgctgcccgcgccggggctcccgccccacgcagcgtcccgaggcggcaggactagggggagccccgggccgctccccgaggtaagagcgcggggtgccgcgggaggagcggccggatcgccgccgaggggaggctgcccggcagggagggagccccctggccggcgggagcggccgggcaggcggcgcggggggcgagcctccagccgcaggaggagccggggtgcctgcgcccggccctgcgcgccccctcctctcggccgggagggcggggagggagtttcccacgtccaaactttccccggcgcggagccgagccgcctctcggcccgaagcccgcagctcccacccgtccccacaacctcgtccgccgcgcgcccgggagcctccgggacccccgcgggccgaggggtggcagcgccaggggccgagccggcgcgccaaaaggggctgggaaggtggcgcacagccctgacgcgagggctgggacccaggcgttcccggtcccccaaccctgctagcggggctcggctccccggcccctcccagaggcggggtccggggccgggaaaataccgcacggcgcgagcgtgtgcgcgcggtgtgtgtgtgcgaggtcgtgccgcgtccggggacacccggaggctgactccagccgcggcgacacgcacggttctggtcccctctgagccggggaggcggcccacagggacccctgccggccccaccggcgcgaccccccctgccctatggccgtcgggcgggctggcggtgggcgagggccagcgctgctctcttccttaggacccgactccggagacaccgtccccgctggggaagaaggacggggcccccgacagcctaacgtccaaagagagcgccacttagggctaaccctcgggggccgcggcgtttactgtgaagagtggactgcgtgggcgcgcggggtgccgggcagccctgggtgggcacagtgtggacccgtctcgctcgcgcctccccgctgcctcttctctggcaacgtcgggccctgtcccaggcggggctgcagagggtagggctgatccaggatcccccgaggtctccccgaggtgcagggcacccccttgtggcgggcagagaagctgctgtttgaagctgctcaggtcttccgaggtgctcgctccttggaacctcttctctccaaacccttcgggcgtcgccagggttgcgcatgccagcttctttttccgtggggctgattccagcactccccaggtttctggggctggccgaggtgcccccagcacaggcagcggctcatttgagggctttggctgttgccagctctctctccctctccacccaggttcaggatctcatcctcttctcccactggtcagcgccaataccctatatcagcatcaccactgccctagggcccaaaggctcctccctaaccaccgcgactctctgtccttcatttgtatcccgtatatgtgtccatcagtgcccactccgtccccctcagttgcccctagtctacagcccttgttgaaacttggcctctacacccatagtgacatcctttggtctttgcccaccaatgaccatttcctcgtcccccccaaccccgacccatcttctatcctgtctgcctcagtttttctgtagcactcaactgttccctgccccagccatttctctacttcacccttatttccctccttgtcccagtgtctgggacactcctcttccattcctcctggaagggaagggcattgccaacatttaaacactgcttcctggagatgtctgtgtgcccttcccggtccaccactgccagtgcctcgggggcaggtactttataaagccagccaggtctctctcagctaaggggcacctgtacctcttgggtggccccatcaggggacccctggagacaacccctttccctattcctaactgtgagcagcacattggagaccacctgggctgccctcttttccattttcaaggattggcaacagcagcccgaggtcacatggtaagctatacccagagccggaataggaacccaggcatcttgacatccaggcctcaccaacgctgcttatgtgttgggtaggcctggggcaaaacagagccgtttcttggcttcacgctgcaggcaggacaagaagacacttgctctaaattcagcatgaggtgttcaagttagacccccagtgctcccaggccagtgccggaggaaagctgttgaatgcctttagcagagacgccgagtagcagaagcagaggacaaagtttggcccctaaaagtgtgttgtgacctccgggtgagtcacagcctttctgtcaaaagggtggctgtgatctctggatgtttctggtcgtgctctggaataatcatacctagaggttggaacccccaaagcccctgctgcttccccaggcactggtctttctgagagctttgcaggagcgctgcattctgaagttgtctgacagggggccgggccatagctaaggcagggagcccaggagggcccgtctcctcccgagttggcaaagttcggagcagccagtttatttaccacatgggcgataagagtcagccaattaaacttcctctcctctctctctctgttcttccccctcccctttttcttccatcaggaagctccaatctgaaatgcagcctcaggtagagtgagagagagtgaatgatttctgtttatataacacgggtagcagctggcactgcatggcctgggagggagtgagggaatagaagaccctacggtggtgtctgggctgaggccccggggccaaggacttcctcattcctccccatagctgagccaggaagggtgctaggggctggggaccaggtggggaaacaggctgagaggaaacccaggcctcaggtcaggctcagagagaaaagcctcatgccccccgcaagagtgggcacaccctccaccccgggttcctcaaagcacctttaagatggagctctcaactcaggcctctccttcctacaaccttgtgttttgattctggcctctctagagaaagcctagatatttcaccacgaggacaggctctgacctcaacttttcatcagggcagtgggcatgataggactgtctttccgcccatggaggagacaaggcctaacaagaaagttgtctgtggagtgatttgagctctgtgtatctggcaggagggacgttttctcattgttgatgatacacagtggctgcttggaaacagaggtgcaggacaggaaggctggaggcatggctgttatatgcagttgggcaggttgttgactgtccaagggcatttaatgcaggaggagagcggggactgaaatctattttaagctccactctccaagtcaggtgccccaaagacaggctgtgcctgcctggaggagggggcatctttctctaatttgcaaaaaggcttcatatacttaccagccatgggcctatggggctgcttacccccagaaaaggatccctttctttaattactccaaaggtggcccatctgggggttaaggatatattcactactcactccttagctcagctctcttacaatgggcacacacctttccgaatatgtgggtctgatttcaaacacatgaggtacagcaacctggaggaattcccttcttcccccacatttccctccatgccccatcagcaggctccttcctgctgtcacattgggattaggctgggaacttcttgctttgtcgtcagacccacaagccttcagccatccacttgttaccagctctttcctgtgcataatataaatagatgattaagcgcgtaggcattggagtccaaccagcctgagtttgtgacttgctggcaagttactttacctctctgagccttagtttcttcctctgtgaaatggaggaaaatgtaatacctgtctcattgggttgtgaagatcaaatgtgcatgagcatgtatggtgctgagcacaatgcctggcacataggacaccccatacataaagcagtattgttattgctcatatccctccatttatattccttggttcccatggggtaaatgcagcagttcctccttgtttggttttgcacatgatctcagctgcctgcacccctgcaggaggggaattgagttaggaccaccaggatctgtctctgacttcaggatccgtctctgacttcaggatccttcttcctttgccttgaggaaggtggagtccctgcatgcagccggcagtgtgggaacatgttctagagtcccacagattcatttcatcctaatctctaccttttctcccctctcatccatctcgcgatcccttctccagctcagacctcactggttcatgcctaacctgttgtggcagcctcctccctggtctcccagcctctgataccctcccgctgcaacccctgcggcaaccagagcgatcgttctctaacgcaggtgggatcgtgtcactggcttgattaaaacccttccatggctccccattgcctactgaattaagtccagactcggcactatgacattcaaggtccttgtaatccgtctgcatcctcctttatctcccactgtgcctccaatctgacactcctgcatccagccccacctgcccttccacctgaacaaccttccccgaagatattccaaagcattaaggacccaacccaaatagcacctcttccttgcatcacccatctgcctgtctgaccatacattcattatccagtttaaaatgtatatatatatatttacatataaagcatttacatatatttacatataaagcattactatgtgttaagcattgtgctgcatggtggagacacaatggtgagcaagcagcctgaatcccagctgacaggagtctggtggtccagggaggaagatgaacaattctcataactgtgacagccagtgggcggggcagcagaggcttctaggaggaagtgctgttgaggcacacctgcaggctgtctcgcagttatctatgggataaaggagggtagggaggaataagagcagagaaggcagcctccatgccaaggggtaccaaggccccaaggggagggagaatagcagaggaactgagatttcagttggctgaaggagaacacacagaggttggggttcagggagtgggagtcatgggaaaccaggccagcgaggtgggcagcagccaggtcccgtgggtcttgaaagccacacaaggagcttggccttcatcccgagagcagcggggagccacgcacaggttttcagcaggggagtggcgcgtggagattcgccattagaagcctcatcctgctgctgggtggggaagaccaggtcccgggctgctggtgtctgggtctgaggcatggagggggactcacttgtgagggctgtgggagtggaatggacagggctaagtaactgcctgggcatgggggagagaaggagttcccattcctggctcgggaggctgtgtgggttgtgaagatgcgaaatgaagaggagaagggctttcaagaagaggtgaggaccagctgtggacaggtcgagggtgagatcctaatgggatacatgagtggggatgctggatggatagtcatgcaaaaacatctaggcccactcagagagttctgggctggaaatagagttttgaggccatgaggaaggaggagctcaccatccaggatgagtctgtaaaatggaaagaatcttgaggcgctctcaaggttcggggacggggttcatccccagaagccttcttggacccagccaggcacacgtgactcctgtctatattttgaacctctgtagcaattagtttagttttcttttctcactgcctgccttgtgtcatctgcagcacattagatcagtgtttttcaactgggggcaattttgccccccagaggactcttggcaatgtctcgagacatttttggctgtcactactgcgtagaaggctgctgctgtcatctgatgggtagaggccagggatgctgccaaaccgcctacaacgcacaagacagtcccccccaccccactgcaaagactcatgtagctcaaactgttgatagtgtggaggctgagaaaccaagccctgtatgagaagatcttgaaggcaggcactgggctttttcattttttcctccctagggtctagcgtggcatatggtgcaaagctgcactcactccattcactgaattaaatttgggtgtgaggagagggggcctgaggccatgcagccttgaagtctgcaagactaaggcccaactctgaccagggttgcctggcccctccccagagagctggaccatgctaatacacaggcacttagagaggagagaaggatgcacccgctggtggggacctcctgtccaggagcccagaagttgagggcacattgccatgtatagttcaccagcctcattctttcgttgtcttattaacttctgttgtttctttatcactcaagtcgatataatatatatactatatatatatttgagacggagtttcactcttgttgcccaagctggagtgcaagggcgcaatctcggttcactgcaacttctgcctcccgggttcaagcaattctcctccctcagcctcccgagtagctgggattacaggtgcccaccacaacacccggccaatttttgtatttttagtagagacagagtttcaccgtgttggccaggctggtctcgagctcctgacctctggtggtccaccctccttggcctcccaaagtgctgggattacaggcatgagccaccgcacccagccatatatatacatatatatatatatttttttaataggcaagttacagataaacaaaatgagaaaatgagaaacatgacaacctactgattaggtgcatgggctctggagccagacagagcagagttgaagttccagctctgccacttaatagctgagtgagcctctgtttcctcatctagaaaatggttgtaacaaaacctacctccaaggactggagaaatgaagtaatacagacaaagcgcttaacactgcacggggctcatatgaagtatttaatacagagtgattctctctctgtgtgtgtgtgtatgtgtgtgtgtgtaaatttatatatatgtatatatgtatgtacctttttatatatgaaagcatttttaattagccataattttaccaccacttggctaccatttcagtgcatatccttcttgacatatatagatttttaaaaaataaaaatggcatcttgctttatacatatgcctccgtaacctgctttttttcaccctataatatattgtgaatgtcttgccatttcgataaatatacatctacatcatcatttttcaagagctgcatggttctccattgtgtggctgcccataattcatttaaccagcccccactgttggacatttgggttgtttccagtccttcgctattacaaacaattctgccatgaacatccttgtacacacatcttcacgctcttgtccgatgatttcttcagggaccactgggacgtttttggcaggagtcgtgtggcgctcaccagattcctcaagtagaagccccttggggccagcgaagaggggactggggggtccctggggaagggaaggatgctggatggcagagaactgttttggcctctggaaagttggtccagatgttaacaccacagacccctctgcgagtcaaaaaagcagaaagccccgccccatattctttgttgtcaccgtagtgcttgcagagtaggggaggggagctggggaggtggagtgtgtgtgtatgtgtgtgtgcacgcgcacgcacacgcgcgcttgtgtgtgtgatgggcagagtgacaggcaccaggcaggcgggggacataaggtggatgggcccgggcaggctgatggatgggaagcagaagcaggtggatccaggtcagtgggtagacaagatgatgggtaggtgacaagccagacagactcaggtaaccagacataggactgtggcctcacagcggggcccacagggaccagaggctgaaattgtgtattcagggacaacagagagttcctgggagaggcagcccaccccccaggccaggaggttgccaaggcctgcgtcttctaggatccaagtggctgtgtttagggttatgcattttggagttgaaagggcctttagggactgacgagtccaagtccttgatacagaagggaaactgaggcccagggagaggctggaacttgcccagggccctatggtgtctcagagcagactgaatcctttgcccctagctcagtctatttcagtgtccatttattcaaatggcttgaagagaagggagttaagttggcagagtgggagggggctgggaggtcagaatgagccttgtcatgacttttctctgtccaccccactccaacagcgctatttatgaccctactgtgtgctgttgagagaactgcctaggagccagactaccagggttcccatctttgccctgccacttactagctgagtgaacttctgcctcagtttcctcatctgtacctatctcataggattattgagaaggcgaaatgaattattagaagtaaagcacttagaacagtgcacttaggcccatattcagtgctctatgagccctagctactaatactgtgctattttgcccttattattattattattttaatttttttttgagacggagtctcgcacaggcgtgagccactgtgcccttattgttttcccttgaattctgtatatgtttgtacgcacctgcgtgctcacacaaacgtgactacatgagcaggctgtgtaccttggaaggcaaaggttgtgtctctcctgtgtcctagccctcccaccatcaggaccctattagccagctgggcacatagtaggtgctccataaatgctcttgaggaagtgatgcgcttgactctgtctggtcgaaggcactgggggaggcttcgtgggggaggcagtatttgagctgtgtgttgaagctaggatgacgctgctgcaggtggaggtgttttctgcaggtggaaagagcatgagcaaagaggaggagcttggcaaaggcttcggtgtcagctggttgccccgttgaccagggcacagaggacatggaggggaggaaagacagagaggaccagaaagggaaggtgcagctgaattcagatgcgtggagctccaggctgaggaatgtaagcagtaggaagctattgaaggttgctggctggaattaagctgtagaaagatcttgctgttgacagtgttttaggatggacttgaaggaaagagaaaggaggcaacagacggggacagctgaaattgtccaggagataagtggggtgggggcttaatgaagttgtagagaacaggggccagggagaaaggccccaaggaaataggatcaacaggactcagagctgcttggttgtgggagataagggagagggtggaatgaaatatgacaaagtctcaggcctggtgtctgggagaactggggtccattaaccaaattaggggagcctatgcttgggagaggcaggggaaaattgagatgccagctgagattattcatccagccagcatcccatctaagccagccatccatccactcatccatccacccacccatccatccatccatccatccacccattcatcaatccatccatttatccaatccatcatcctccagcccacccacctccatttaaacatccatctgcctgcagttcacccctcacccacctccacccatctatccaccaacccgttatttacctacacgtgtatcaccacctttctttccgtcttcttactacctgtctctccaccctcattcaccctcagaatctaccaacttctccatccatccaagatacatttcttgtgagcctactatgtgccaggctctgataaaaccttaacacagcatttgaagatacctgatactaaagataatgattagaaaagccaaggaaaagaaccagaatgattttacctagaagagagaagtttgagaggagactttatgtatccaaagtgaagaagaatggaatgaacagtggcctgtagatgagcctttttttttctatttccaggacagaacagaagaaattggctgcacttgcagctagacagattgaggttggctgtgagggaggacaaccttattgatcattacaggtgtctgaagtaccgatctgataatgcatttgggctgtagggggatatcatctatagaggtgactttgaggaaatgggtgcagagtgggacatttgtggaggagttagtagagggggcgtcgggatcttgccttgagaagaggtgggtagggggagtggtggagcagaggacgaaggtgaggggaccatcaggggcacagggctgtgtaagccaaggagacaagcctgtggctaggatgggtcagctgaggtagggcacctgggtagtgggtcagggaggagatggctgcatttaatccccaaaacaaccttggaggaagggccttcccactgtctcactgccactgtcccttcataagccaccatttctctccaagccctcatcctcttggaaagccccgagcccctcccagaacccctgtccccagcatgttagcccccatcccctcactgagcccgcactctcttttctgagcctttgtgctcacaaaccccagccctgcagctgagcccctggccagatccccacctcccacagagcgcccgtctcttcttggagtccccatctccttgtggaggcctggtcctctctcaagatagagcccccaattccccagaatctccacagagctcctgcaccccctgtgaaagctctaaccctccacggagccccccacccttcctggagacccatcccatccctgagcccccgttccatccctgagcacctcctgttacttagctcctggtcaccttctggaatgcctgccccttccagagcccctgttctcccacagaatttctgtcccctgaactgaagactcatctcctctctgagcctgcattccctcaaggagcccgcatccctactcacagagccctgacctcctcactcagcccctgcccctcctggagcccttgagcagcccctggcttcgagccctcatgccaccctctgtcccagggtaccagcccttgatgtccgcggggcacaatcagccagcagtgggtggccccagcttaaagtcactcccaggtctctgcatcaactcagccagcttcaggctgggaaagaagcccctggatttgggaccataagaccctccccgcagcctgcctagtaccatgggtgggcttttaggacagagggacttgtaagtccccaagtgggctgggctgggggtggagacctgcagctttggcagctccatcaggctcgtcttacgggctgggagaagctggagactcttgctgcttctggttagaaaaacaatcacaaattagagaaaatgctttgggaaattgctctgctgtgcgagagggaggctgcctcaggagggagggaaagaggctcctaagacagcagtggctccctgtggccttgcctgtcagcgccaaaccatctgcttggcgttcaaagccccaactcatcatctgacatggtcacctgatgagctcagacacatacccgctaggccattgctccagggcccattcccacctgcaaacctttgctcacctgggctgagccctcacatctattcaatctcagtgccctgtttcagccctttgcgaaccattgttacctgtcttgcctctctaactggtccattgaggacaggaataatgtcttttgctaatggcagtcagagacaggcagatctgggcaccaatccctgttggatacattttagctggatggccttgggcaagtgtttgactttctgagcctctgtttactcatctgtaaaatgaggagtgtaagacctcccttgctggaatgaacgagataatgagcaaatagtgtcctcacagtgggtaccaaattaatgaagatgcccctccctgccttacagccagatcaggacttcgggctgtgagaaccagcactgatctacagacgtccacttattggtaacatcctcaggtgcctcttctcttatatctgtctgccactcccctactgcgaagatacaaaaagagggcccaggagtttcaggacaagcacctgggaggctcctgatataaaaagatgaggcaacaggcccggcatggtggttcccacctgtgatcccagcactttgagaggccgaggcaggaggatcacttgaggccaggagtttcagacaagcctgggcaacatagcaagacccccatctctacaaaaattaaaaaattagccaagagtggcagcacacgactgtaatcccagttacttcagaggctgagataggaggatcgcttgagccctggagtttgaagctgtggtgagctatgatcatgccactgcactccagcctgggtgacagagcgagaccctgcctctacaaataaatagatgaggcaacaaaagttgaatttttgagtcttttgactatcaggcaagacttaagctggatcatcacctatcaggaggaatgaggatggcagcccagagcttggattctggaagctggacttggattttggaagctggacttcctgggttctgctccctgagctgccccccttcctagctgcctgtccttacacaagttacttaaccacctcagtttccccatctgtaaagtggagatgataatcacagtagctgcgttacaggcttgtggtgagaatgaaacaagctaatgtttgtaaagtacttagaacagtgcctagcattcataagccctatgtaagggtttctttaaaagtaaatgtgatgagggattcgggaacacaggagtggacagcggagagctcaggctgggtagcaaatgggctttcaggagggagttctgcagagctagagtccagccagcttcctgtcaagttggcctctttctgaatagggagagcacaggatattctcaaagcaaaaacattttttctggagaccactggggtgcctcatttggagaagtctgggccaaaggacgttgcatggagaggcggcctctgcagagggcagcagggaaagacatccagggctctcagagacaccccagaacctcacagatctcacctgccagtgagaggctcctcgcatgcctgttctcttcctggcagtgaaagacaaggccaattgtgtgtgcccttcgtggaagaggtctcggagaattctctccctccagacagtgagcagagaatgaagggtgtgaagaagaaacccctcctcagccacaggcagctctggaacaagccctgttactgtctgccgggtgccaggcctgtgctgggcaccgggaaggtgcagtgggtcagatatgttcttgcccttgaagaatttgggatgaacagccaatgccaggaatcccacttctcctagtgcctcagttttttcagttgtcctcttcccttctacagagtagccttttccttgcccctttctttccctctttctcccaagcccccacctacccaccccagcagaggttggggggagccctgtggagaagggagagtttgtacaaactggggcacagttggaacttctgattggctggtcagggccattcttttccctggttgccatagcagccatttcccggggttgtcagtgatgaaactcataaacattgttttcaaataatccgtgtaattgaaataacaattgagctgttaacttgtctctcacaccccagctaggacagatcttcctctttccgcaccctcctaccacccctgggaagctctggtgtgtccccatctcctgtctgaggccccagccccttccttggggcaggaggaagaaagaggaggttgcatggctcctcagcatcattatagaatcctagaaactcaggaccccacagctgaaccagaacttagagaacagaacccacttcgtttgcaaccagagactcaaggaagggaaggggcttaactagggctccacaggaaggacgcagctgaatgaggacatccagtcctgcttttaggtgaaggttgaagctgatgtgttgcactgaggatcaatgcataaaccataaagctgcccccttttaaggatttggtcttgcaggcatatctacctacccctacccccattttacaagtgaagaaactgagactccaataagttaaacataatataagtgtttttttgttttgagatggagcctcgctctgtcgcccaggctggagtgcagtggtgcagtctcggctcactgcaacctccgcctcccaggttcaagcaattctcctgcctcagcctcctgagtagctgggattacaggcatgagccaccatggctggctaattttttgtattttagtagagatggggtttcaccatgttggccaggctggtctcaaactcctgacctcgtgatacgcccgccttggccttcgaaagtgctgggattacaggcatgagccaccgcacctggcctctgtgtttttatagcttctcagaaaatacctgttgaatggatggatctcaaagaacacagaccacctctctcctccccacccccaaaaccaggaactgagatctggtttctttagtcagaggacttcgtggaatagggttgtggacaatttggggacatgtggctcagaggaagagtggattcctcaaacgactattagagggagggaattccaaagttctccccctacccccagccacccctatcttgggtcggagactgcacattcagaaacataaacatgaaaaacataggttccctgcctgatcctcagaaaggcctgggatggattgaaaaatggaagaagcaaggcctcttctacaagcacatgtctccatgcacacacggagatgcaggtcagcacagacagctccctgtagcggcagcttcatggaggataaaagcattttttataaagtgtctggttgctgtccaaggtactctctgagtccacagaatgtgtgggtggctgaggcaacaggccattgctaggactggggatgggggcagtcttcagaccagatgacagcaagaggttggcctccttccctggattctagagggttgtaaccactaaggggtcttggcagtctcctcccccaattcattcattcttacttactcaacatatactgagcatctactctgtgccaggcactgtgtggaccacaaaaacattaggattaggaagacccaggatctgtctgcaaggactctttcagtctagtggggaagacacacatacacacacacacacacacacacacacacacacacaaccagtggctggtgctcttctagaagcaccagaacagaacaaaagagggagtgattaactctgcctgcaggaatcagaaagaccccctggagcaaatgacttgggctcagtcttaaaaagatgaatagttctccaggtggataatgggcaggagagcatttcagaggggcagcatgaaccaacgcagggaagaattcacggtttagatcacaatgagaagttctgtgtgactggagtgttggctgcttgaaggtgaatggcagattgaggagagtgggttctggagaggggcagtgacttgcccaagatgccactttgagttgcaggcacagccaggactaagacaccggataccctaatttgtcagaaaatcagaacatcagagttagttgggcgtttgcgattctctaatccaaactgcccatttttcagatggggaaacagagggtgagagatgttcagtgctgtgcctggagtcccacagtatgggtgtggcagagctaggatttgaaatctggtctgtttgacatcaaagccacagctgttttcctagtgccacagctaggagcagagcgaaccccacctcagctcagctggagagcagagggctctgaaaaggacgggctgctcatgggacctttgcatttattgggacaggcagccagctcctgccatatcgttggcactcaacactcaccctgggggagggagcctccagtgggaaagctcagcaggcatgccttcctgttggctggagagacctaagtcctaccaccaactctctgagtgaccttgggtaaggtgtgaccctctctggtcctttcttccatgatccactatgtcataggaggatcctcctttgcctactgtctggagcagtcattctccattggggtgggagagcagttgattttggcctccagggaacatttggcattgtctagaggacaattttggttgtcacaactgggaataaagagtgctactggtattcaatgggtagaggccaagaatacggccagccatcctaccctgcacaggacagcccccaccaacaaagggttatccagccaaaatgtcactgctgctgaggctgagaaaccctgaagtctgaggccatttgtgaagatcagatatggccacaagagtgggcacatggggctgtgcagaggtgcaccccaggctgcaacgcagaggagcagaagtggccttgctgtcaggcagacctggctgtgttgagaggtcgttcacctctctgtgccttggttacttcatcagtgcagcaggggccgtaacaagagcacctatctcgggagactattgagagggtgtgatgagatcatgaatgtcgacggcagaggaagcaaatggaaaacagaagcctggagccagctctggagccagcagggccgctcagggctatgggatcttatgcaacttacctgacccctttgcctccatttccaatctgtaaaacggggattatggtagtacccatcacacaggctcaatggaggattaaaaatgagttaacagatgtaaagcatttagagcgacacagagtaagtgcgatgcaagtgttagctattattatttggttttgtttgttttttgttttatttatttatttatttatttttgagatggaatctcgctctgtctcccaggctggagtgcagtggcgcgatctctgctcactgcaacctctgcctcccaggttcaagtgattcccctacctcagcctcctgagtagctgggattacaggcacatgccaccacatccagctaatttttgtatttttagtagagacagggtttcgccatgttggccaggctggtctcgaactcctgacctcaggtgatccacctgcctctcttcccacagtgctgggattacaggagtgagccaccatgcccagccagctgttattatttgaattctgtcttgaacaaggcagtcacataagttgcagagggtgcattggacaccaggccctccagatgccaactctctctgcagctctctgactatccatgccacacccccagccttccttccaaacacaccccccatagaccctgcttgggctctctgcaactctgcaaaactattactctctctctctctttcaccagctcccaccctgcttgtctctagcttcgtgaattccctgacacattgggctggccctctcctccttctccctccccatctccaccctaacccccttcctctcccttagagtctgccagagccagagttagctgtcagcagctccatccaggaggagggggacacaagggtgcccacacctgactctatagctcaggcccgcatcgcactagccctccccctaaacactcatatcctgactcctggcccacttggattagccttggctaacccttcagagaatgaataaatcctccagtgctgggtttctcaacctcagctctattgacatttggggctggataattctttgtcgtggagggctgtcccgggcattgtagaatgtttagcagcattcctggcctctacccactagatgccagcagcaccctcccacccagttgtgacaaccagaaacatctctagtcattgctaaatgtcccctgggtggcaaaattgcccctggtggagaaaaactgttcaagaacttgactatatattgtgagcttctgtctcatagtgtcctggcaaagaagctttgaaaatctaataaatatcctcaagttgagcccctcaagttgatgccaccttcaactttgtacagttttctcaccaaagttttcatttcttgacccattctcaaaaccagttgaccacaaacattaggcccagctcccaaacactcagctctaactagaattctgaatattaactttaaatccaaagcttcaacctgttttccaaactccaaaccttaattcagaccctaaccctaaactcttggcctgttctaaaactttagtttcctgaacttccaacagaattctaaatccacaggttagcctcaaacatgaagccaagttggaaacctgcacttccagatccttccatcaccagctcctaaattttaatctctatcccttctggcctctagagattccttggctcatgtttctagcttcctcccctcccaggtgaccccaggtccttcagaaatggcaggaaaatttccagtaggcagctctgtctagccataatccctccctcatatcgccccaggcaatccatctggaaattctattattattcatttgtttattcaaacatttgatgagcacccactctgcagactctgtgttggacaccaggaaagcagtggagaatcggatccagtggcttcccgctgtctgctgggggagacagacaagcagacaaacaggaagacagatagataaaaactatgcgagtcattcaagaaatatccactgagcacctattatgtgccatgcgctgttctaaatgctgggaatacagcatcaagcaaaaaagacaacacccctaaaatcatggcactcacattatagagaaaggaggcatccatttataatatatcagatagtgataagtgttatggagaaggtgaagaaagcaggatgaggggatatgaatggcctggggaactgaggagctagtttatcacaggttgtaagggaaaggtgcatggggtcagccatttgagcagaccctcgaaggaagggagagagtgagccaggcagacatcaggggcgagggtgttccaggcaagaggaccagcaagtgcaaaggcccaaaggtgggatcatacctggtctattcagagaagagccagagggccagtgtggctgaaatagagggagaggggagtaggaaaaggtcagagaagtaacaagaagccaattcttgttggatcttatgagccattttactccgagtaagacaagaagccaaaagaattttgagagaaggagtgttacggcctgatttatgttttaacaccataactgagaacagtctgcagggggccagggcagaagcagggataccagttaggaggctgttgcaatcatccaggtgagagatgatggtggccggaccaggctgctaacaatgaaggtggcaagatcggccagattctggatctattttaaggtagagctggcaagatttgctgatggattggatgtggggtgtgaagtcaagactgacttcaaggcttttggcggaagcagctggaagcatggagttgccagttaccgaactggggaatgctggaagaggagcagtttttgaatttatgttctcattatttgtgtgtggttgggggtaggactcaggagtccgggttcagacatgagggttttgaagggcgttttagatatctgcactgaacaggcaagaggctctatgtgttgggttttgggcagacatctgagttggacacacatatttgggtgtcatcagcaaatccatggggtttcaagctgcggggttacatgtggtcatctgaggaggagtggcccagggactaccctctggggccttcgaaaacttggagggaaatgagatggaaacagcagaggaaactgaaggagccaagagctctatgaggtacagggtgctgggagaggtgtggacacataggggagagagaccaaatctggggtaccagggagggattcatatattggaggggatattggagcctggctttgagtgattcatacaaaatcccccatcagacaagattggggaaggacattctccctggaacagtacatgcaagggctcacaggcctccacacattggggaatgttaagctacataaatggttccttatcctccaaacttgctacttccctctcttccccaaatctgtgaatggggccacctcaaggtcttaccgaacaggtcctcatcttgcagctccccgtagcattcctactatatcccgaggattctgccttccgtatgtctctagaaatagcccactcctctccaacctcactgcccccacctacttcaagccaccattattgttcacctggacaacatcctcctctcccatgtccgtgtttcattctcagccacctgatgggggaccccagcaggtgaaggggcgggggccagtctgcttcacacccacagtagcctgggtgagttccaaacagaataagattcatgccaatcctctgcttcggaagctttcaatagcttcccattgctcttagaatgaaatctaaaatttaacaaggcccacgagatcctgcacggtgtggcctcctgcctgcttctcctgtctcatctcggccttcttccccattgctcctgacgtgccaacctccccgctgcctttcaggttctcagcttggcaaaatccatccagcctcagggcctctacccaggctgttccctccacctggctgccctcgccctcgccacccccacactccagtctgagaacaaatcactttctcagggaccccttcccaagagccccagactagtccgagctccctgtcagatgctctccttgtacctttcttttatagtcatcatcgcatgttttaatgaagtcgtgagttaataatgataataacagctaacacttacggagtacttcttactccatagtaaatgatcagaggaatattgagtgattcacatatctttttagctatttaagtcctgacaccaccgtgtgaggtagctactgttattattcccattctacagaggaggaaactgaggcccagaagaggttattcatgcaaggttacacagatgataaagagctaaactgacacagacctaacgtctgtcttttctgcttgatattaaattccatgggatgacggaccatgcccgtcttgttcacagcttcatcccctctatccctcagagggcttagtaaatgtttattgaataaatggatgattgattgaatggatgaataaatgaataagagtttgagcagcacaggactccatggtattggaatgcaagaaaggaggctggagccacagaaaggaagagacatgaaggaccctgaatggcagacagatgagtctggaattgggtctgggccacaggagccatagggctttctagagcagaggagggcagagctcagataaggatgttagacagatatagcagctggctgccacggaggaagaccagaggtggggtccttccccgcccagcaaccaggcaaggctggcacccaccccctctcactcagccctattagcattctgcatgtggctgggctccacaattaacacaaaggtacagtcattcattctgactggtagactcgggggatcggcggatcgggggctggctgcgcagggtttctgctgggaaggcatgtcacagcacagcggccactgaaatgaaaagctattaataatgatcctggaacttcactcccatcagctgtttgtttaaaggtgttccatacttggagctgcctgatttatgtgggcaataacgcgccctggtcggtccgcactttttaaagcagcgctaatggggtgagactgagaccccgggggatgctggggaataaggcttgagggccaggcgtggtcagatttggacctcgactccctgcccagcatcagagtgggagagctgaaagagccaggcagctgggttcaaatccagcttgagcatgtccctttccctctctgagcccccgtttcctcatcttctctttgagtaagagaacacctgccttccagggttgacaggaagatcccatgaaaagcatacagtaagtgctccataatgtcttagttttctcccctttctcttttccttgtagaaaaactctccccaccacctgccagccctctccaggaaggagaagcattcaatccacttaaatgtttatcgagaatctacaattgtatttgacatttaaattcctgaaggcctgacaaaaatgctgggacagacagcctgtcgtgcccattttagagattaggaaactaaggctcagaggaggaagagacatgcctaaggtcacccagctcaaaatccactacatgggagtcccaaacgggcagagattgtatatattttaatccaccactgagtacccagcaccttgtccaatgcctggtatgtcacaggagcacaatgtatatgtgtcaaattgaaaacaaaaggtgtctgaaccctgaatcttgcctcagaggtccaattccctttccatcatttaatctcagtggtagaaacagtcaggagacctggattctatccccaactctgaggtaagttgcttaaagggaacgttggatcagatgaccgcagggcagtttcttaacatcagcactactgatatcttaggtttgataattattttgtgtatgggtgtttggggggaaggtgtcctgggcactttggaatgtttagcaacattcctgccctccacccactagatgccagtagcagcctctcagttgtgacaagcgaagatgtctccagacgttgcaaatgtcccaagggtcgcaaggtcccccctggttgagaagcactgcactaggggctttctccaaacacacaaattctgcacagcagaggtctacattgtggtgggggagtgggggagacttggcctgtgacccaggaaaaatgtcatgttgacattttcacaaagtctcgttttcccatttggcctgttcgagaacaattctcctttggcagagccaatcaccaggcagttctgctaacaatgctgcaacctggtccacagaccggatggtcacggcacatgcaaaggcaagcttcccagaatgcagctaaacatgggaaccaatgagtccccaccaggtacaggggcgaaagagaagtctggggctgttggggatgaatgaagaccaggagtgatcagcactgggtacagtggtcaggttgggggtcgggggaaagcctgagcagagatggagaggcaggaatgagtgctgatgaggagtgagggaaaaatgatctgtgcccatcccagaaggacaaacacctttcagactttccctcccattttcccacctagtaaagctgcactatctcggcaggagacagtttctcctggctccaagtcatcccctccatgcctccttcccactgggactccttacacagaggcggcctggagggacagaaatggcgtgctttggtgtcagacaccatgggttccagtttcagatgggaatctacagccctgtggccttggctcacatgacaaagagaaatattaaaaatactgagccactggaccagcatactcactgatcaatcagaacaggtgacagttgaaaacaactgacagggctagctgaacatcggccccacctctgagtctgcacctccacctctgtacatctacctcctggggctgtcaggtgaaatggagagaaagcacccagcacagcagcttgcatacagcagggattcaataaatgttccttggcttcccccaaagatcccagaaggtgttgaggtctgaattttctgcagtgggtccctgcaaagacatcattctttccagatgttgaggaaagttgtgaaccgcttcttccagccagggcttaggagcagggaggctgagaacgatggtctgggtgcaaagacgaactgcaatcagggttcactgatcacctttgtccccctggtggtctttgtcctgcccagggactctggcacaccttcctgtcatgcactccaggaagatctgggtctgtgcgtcagacccgggccagccagccccctctcggtgtgtataggcagcttgtcactacaaaatccattttcttatctcctgccatatctatttttctaattcttacttaacgagctcccctgaaaataagaaaatcattggaacaatttccttaagtgtgaaagattagtctgaaattggcattaaggggactaattaccttcattctcccacctttccgacagccgtttgttagctgtgaggactcattcatctgctgctcagggaagtcaggcaacatttggctgtggtgggatcctccgctcctgctttggctcacggggtgtgtgtatgcgtgtggtgtgtgtgcatatgtgtgtgtgtgagacagaaacagagaaatggattggggagcagaaaagtgcagaaaggcccgggactccatgtgaagctgctctctgggactctttggtgatggcggtgggggtggggagggtagacatccaactcagaatcaggggtgggtggatacctggggaggtgctggcatgagccagacacacatggtctgccaagctcctagaggtctggattccctgccgctgactcactgaatgactatggggaagtctctgtgactgcaggcctcagttttctcatctgtaaaatgagggtcatttcttgtaactacggtaatgacagcaatatccagcttccatggagggcaggcatcgcatagtgattccaccccctcttcatcctcaccatagccccgggggcagttcctatcattactgcagtgtacggatgggaaagtggaagaccagagatgttagggaacgtgtcccaggtcacgcagctggaatcggaatctgagtctgtgtaattctggagctcatgtcctgtccactctactcagactccagacctccccctgctcccagaatgcattcccagtgcacttggaggctgaagacataggttccaaccccaactcgagcttgcaccacttgtgtgaccagaggtacatccaggcatctcctctgtaaaatggagacagttatgcttcttgccataactggatgtggggggcaccccatgccgtactgcatgctgtaaacaaaaatgaaaggatgtggaagcaaaggatggcagtggaggagggccaggaagaggcgagagctgcacagagtctgtggaagccctgggccatgaacctgggtctctggactccaggctcccctagacctggccagctgctcccactcctgtccctagctttgaagagcccgccttcctgaacaaagctctgagcagcaaggaggcttgtgacgagggagcaagttgacaaatggtgacgcccagaattaggcagggattacgggttccagcgtccaggcctgcacctggtatgggggaggggcaatcacccacccacccttccctcccccgggggagaactcactgggggaggcggataagctctgagaagacgacgggaacatcttccattttccatttaaccacccgatattgaattataaataattcatacacctgccaaacatttgattaaaagaacccaattcgcactgcatttgtcaaggggtaagaattgcatttggtgtttttattttaatctgtcctttaactcttttacgaatatttatttacacttggctgtcaggttttattctatttgccctgattttattctggctgtagctggcattttttccttaccctttttattttgtcacttctgcctagtagtcatgcatttgagagcccagaggtaataaataaggaagcgagactccttcctgctctctcagggcacttggccccatgcatctccacccactgtgtgtagagacccctttctccccagtgctgctcccaccccccgggcaaatctactgtggaatctaacctgccaaactcagggtatcctgggcacgttgtattcatttctgtctctggatctttgtctatcctgttctaccaccattctcttccctctttgccaaccatggtgcaggcactcaataattattttttcaatgaataaatgaagcatgatcatcagactcatcagtatcggtatctttggggacaaaaaggaaggtattcgtattcaagtctagtgataggagaaagctgtcatagtggaccttagatccagctcctgctctgccagctgtgtgaatttcggtaagatactttcattccctaagctctgcattctgtcatctgtaaaaggcatctgtaatagtagcacccgcatcagacattgatataagaattaatgcgtgtgctccgcacatagtaagcattcaaaagccaggagctgtgatttttatgatgaactgtaaactcctttctcatatcctgtccatattcctgcctttcccttgaatctgaaggtctgggcatctgtgatattatcctgaatgccaggtgtgggtcgacagatgtgtctgtgacaaacaagaaaaaagaaaaactgaccatttccctttgttggctacctaccttcgaaataatgcactctgtgtttgttggagggcttacatgggtcagtttgtgagttgacataaaaacttgttctgccaagtgattcaggtgagctgggaatttccttgagacccgtgtcaacgctccctgaatacaaaggcaggatgttatatgcccaagaaaagctgtcgacaaggacaagagagtatcagggtaggcgtatgtgatttttttccatttacaaaacacgtcctcatatacatcacaggtttcctttcaatctccaagaaaatcctagcatctttcaaaatccagtccagccactctactcttccctggcctcctccagtcccccaggcatctcacaggattagaagggatctcagggccccatctgtcacctgaactgttcaccacagcctcctcaaggcctccctgcctccaggcagtctctctaccgctgggcttcccttccaaagccaccctccacacagacaacatgttctttcagaagtctatttagacatgtcactcccttgatcaaactttcaatggccccctactgccctaaaggtagagttcaagatggccccagtgagctgaccccagaaatcaattgagattgggaagacctttgcttgtgagtaggtctgctaccccagttagattgtggtgacttttcctgttgtcattggtcctttaaccccacaaacttcctgaagccaaatcacagactttcctgagaacctactttgtgttggacactgtggctcacacagcattcagggttaagccagacactgcctagaattatccaggcccctgctcagagttggagaagctgttggaagaggaaaagagagcaggacataacattcactgagtgcccaccatacacattttgcccgcagcaacctgcaaactaggtcttatcttacagagtgaggaagtggattgctcaaggtcactgtatgtgacagaactgacattcaaatccaggtctccctgagtccaatagccaaggtctatcctcagcactacactgcctcccagggaacagtgagtgagggtctcaagagagaaggcagcccccagaccataggctgaggtctttagggccggttcagatgggactgtggtacttctgcctggagactgccagcccccctgagaaggtgctcagaggactctgcccccaccatcattatcctaatgacaacaacggccagcaggcagtttaaaaggtgttgttgttgttgttattgtcctcagagcctcactctgtcgcccaggctggagtgcggtggcgcgatctcagctcactgcaacctccacctcccaggttcaagcgattctcctgcctcagcctcccgagtagctgggactacaggcccacaccaccacacctagctaattcttgtatttttagtagagatggggttttgccatattgatcaggctggtctcaaacacctgagctcaagtgatatgcccgcctcggcctctcaatgtgctgggattacaggtgtgagctaccgcacccgggctgttgtttttaccccagagcttgaagcagcagaaaaagaggcccagcctgtggaaccagacagccccaggtgtgactcccaactcgtccccatgacacgtatgtgacctgggacaaatcactgcagccctctgtgccccggtttcctcctcaatagcacagaaattataatccatccctcaaagtcttgttgggaggatggagtaagttcacatgggttaaaaaaaatgctccgtcaactagaaaatgaattacacattctctctgcacgtataatttgatcctccaaacaatttagtgaaataggcagggcagaaattatttaaataaagtggttaatttcttttaaaaataattttaattttataagaaatacctgaatccattctcttagaaatcagggcactgtcgatgaagctgaagtcccttccccaccacctccaatctggtcccctcccacttcctcagcaccagctcctaggatgagcttagtatgtatcactgcagaccatttttagactttagcatacattatatgtacccacagaaaataactagcattgttttgtggtatttttaatgtaaatggattcatactgatgtatcactctgcaatttgcttttttctctccaacaacgtttttgaaagctatcaatgttgtcatatatagctctggttcactccatttaagtggctgtgttccatcagatgaatacactccattttatttgtccactcccttagcgatggacccgtaagatgtttccccttttccccttatcatcagccatgccatgtgaccatctgtgtacacacctcctgctacacatgctgatatttctctcacactgactcctgagtcatgagttttttgcgttttcagcgttaatggaccagggtggggcttattaattatgataatagttatcatataccgagcttttgcaatgttgtaggagagcgtgtgcgcattatctcattcagcccttgcagtaaaaccacgtgggagccaagattctctccagttttcggcagacaccgctgaggtccacccagagagacacaggattcacttagagccacatagctgggttggaacagtgtctggaccagaacttggccttcctgagccgaaatctgccccctcccccaagcagtggtctttcctgctgctcttgaagatttagagcaagaatctctggaaaaactaactgggccattccggacccagagccagaaatccacaaaatggcccagtgcaatggctcacacctgtaatcccaatactttgggaggccaaggcgagaggattgcttgaggctaggagttcaagaccagcctgggcaacatagtgagaccccatctctatccccccaaaatttgtttaatagccaggtgtggtggcacgcacttgtagtcctagttacttgggaggctgaggtgggaggattgcttagcctgggaggtcagggctgcagtgagctgtgattttgccactgaactccagcctgggtgccagagtgagaccctgtctcaaaaaaaatagataataataaaaacaaaacaaaaagtccacaaaattccaagtggcaggtcccttctgatgatatgaaaggtgtctgtctaggtcatctctaggtcagaaggcccatcctgagttttccttaatccagacattggtggctggggtggcagaggcaggactggaaggggcattgaaccatggagttctagtctcctggagctgaaacaacctttaaggagaaactgaggcctggggcagaggtggggaggactcactgaaggtcatgcaatgcaccagagatgcacagaaccaagaggctgcctgggccctgaggccagctgaagggcctgcaagcccaggctgggctggtggccagcacgagaagcaaagctggggactgcccccagaagtgtagaactggagggtggtcccccagagggagtgcctaggagcccagggggagaggcctgggttctgttcccagctccctggggcccccaccccttgatcaccctttcgctcctcctccttctcctcctcctcctcctccttgtcacctgtcatcacggaggatccttccttcctcttgtctcggccaacgcctcctgccccctaccttctgcctggatctacactttcgccccctctcattagcactgagcacacccaactctctcctttaagaaagccctccctcggccctgccttcctctccagctaccgccccctccctccttcccttcaaagcccaacttatcaagttgtcttcgcttcactctcccactcactgctcagcccactccaatctggtgcccgccccctcctcgttacaaccatcaccaggtcacaggtggccttcctggtgctgtcactgaggacgccctgatcctcacctcaaggggcccctcccccttggtctcttatcagcactggaccggtggggggcgggccctcctccaaactcacccccctctgatttcctccaccccactctcttctgctattcctcccacctctctgaccaccccttttcactcaccttcaccatctcttcccccacctaccccttcattggttaacaacgtttattagttaaaacaaagaacgatagagaaaaaagccaaacaaaaatgacttaaaatcttaccaaccagttattgccttattcattttttgcaaaaatagacgtggtgtgtgtgccacctgcataagcccatgctgtgtccacagagaggacaagggaggctgtgacagcgccctccccacctggcccgctgctctccagaggtaaaccctgccaacactatcttctaatgccttctagaaaaacgtttggttcatacaccaccatatatgtcttgatattatgtttagttaccccaaagggaccattctaacagcctgatttgtacttgtgccaccccttaaatctcggggctgtcctgggcctttccttttttttttttttctttagaggtggagtctcactagagacagggtctcgctatgtcgcctaggctggtctcaaactcctgggctcaagcaatcctctcccctcagcctccaaaagttctgggattacaggcataggccactgcacccggcctgggccttttcctactcttcacactgccttgagccagccatctcagccaccctgtggggtctttgtggtgataagacctgattcacttcttgccagctttgatttcttctttggattccagacccgcaaaataaaccatccatttgacatctccacttaggtggagaagctcacactctttgtggatctggcatcttccctggaaaacagaaaactgtctcactttctctggccctgcccacacccatctccccagatagctccactgctaaccccagccagcaacctgtgagtcacccctgaaagtccaacgtcgtcattagactgtacctgcatgctggatacaccacttatgtttgtggagcctcatctgtaagatggggatgccagcagttccttcctcccagtatagttgctgatgtgtggattaaaggagatagaacctggaaggtgctcgggtagcccttcctggcacaaatatctgcttactaaatgctggccatggttattagtgtccatgatccttccttatccctctctttgctgaccacctacatccaatcaatcgcccacgactgtcaattctcccagccggactagctaaacagtctcctatccagcctccctgaagcaactccggcccctccagtctgttctgctcttgacagccgaagtgatcctttaaaaggtgaatctaatcactgtcactcccttgtttaaacgcttcagggatcaccaacatgtctaaagtccagggtctctcctttggcttcaggctctgcagagattcagtcagagagttccagctgtgtgtggccagcatcttctctgattggtgggtgccccactgagctcactgctacatatttggatgtgcccaaagtcctctgcagcctggcaccagcaaccacctcaccagcatctctcctctgcccccatcacagttcatatttcagctggaataaattccccaaacaggatgacacactttctccctgacctctgggccatcatatgtgctgttccctgggcctgaacccctcttcttcccacccccacctggccaatttctacttatctagtagatcactctccaggaagaccctccctcatcctgctcccatagcagccttttgtaaagtttctttcactcgtgatttcttactgatggggctaagagggtttccctctattactggcttaattttttttttttcacctatggtctctaccactaaaatgcaagacatctaagggtgagagatttgctcattcaatgcgcttctgaaggctcagctcctggcacagagagggtgttcagacaacgtttgttgaatcacttattaattcaaccactcaacaaatatttgttgagcacctttccatgccaggtactattctatgccctaaggatacatcagtgaattgaaccaacaaagattcctatccccttgaagtgtacgtgctatggaggagagagggtggcaaaaaataagcatcataaataagtaaatcgcataatatgttagaaggtgataagagctatggaaagtaaagaatagagaaaggggagttggcagagccttggagaggggctgtgattttaggtggagtggtcgggttgcttttcattgaacaaagatagtcagatggcaagggagggaggcccacagatatggggaaaggagcatccagacttggcgaacagctactgcaaaggcaatcaggtgggagaatgcctgccaagaaaggaaaactcagcaggccagcagggctggagcagaggaacagggagagggggagcggacagggtgagaggggccacaggggcggatcatgtagagccttatagaaacactggcttttgtactgagagaaatgggggccactttttccaaaagctttattgaggtataatttacatgctctaaaattcacccattgtaagcacacaattcaatgagttttcgtaaattacagagttgtgcaaccaccacgcagttgcagaacattcctttcaccccagaaagagcctccgtgcccatctgcagtcaatctccatccctactgccagcaccaggcaaccatttctttcgctttctgtctctatagagttgcctattcgggacatttcctataagcaaaggcatacaatatatgatttttggttttttttttttttgcatctggctcatttcattgcgcgtaatgtttttgaggtatagccatgttatagcaggtatcagcagctcattcctttttattgcttaatagtactcctctgtttggatataccacatttgcttatccattcactggttgagaggctttggggttgtttctgctttttggctatgttgaatcatgctgctatgaacattttcgtatgagcttttatgtggacatatgttttcatttctcttgtgtagacacctaggaatgaaactgctggatcgtatagtacatttacatttaacttttaaagaaactaccaaactgttttccaaatgactgccatgtggagaataatctacagtggaacaaggatggaagctaagggcccaattgtttcattaatatcattaattaaataaatccactgagtttaaggagaaaggcattagaaccatcatccataacttgggcacgtggtgtccaggttggcaccaaagacccttgttgaggacctaggccagggaaaccctggctgcaaacccagccttcccagccccagaaaggagcagagagccctgtcatatccctacccctccctccatgctgcccaatccccagaaagcttccacgcagccaaagcatgaaaattcccagtttaaagaagaatcagcatcaggcatgactgttcgaagctgcagagtcctctcccccaagggagatgacaaaattttctttgcaattaaaattcctttgaaactaggaccaaggaaaatgcagaggagaaagcgttttaaactaagggaaatactcttctgtagcaattaccatgtgtgcatttcaacaaaagctgttgcctcctctctccctgctcttccctcctcccagtggctgcagggaactgtcccagcccaacttggcttctgcattcacactgggccctggggccttccttggcccctttccctggctggtccctgcttctctgcccactcctagctcttggattcctcacacattccagccttgagttcaggcctttactacaatgtccacttcctgtgagtcctttcacaacccggtggctcatctgccaagatgcagttccatccttgcactcacctatctgataccccctgccattgtcgctccccattctacatgggtctttccctcctctgagctcacagccctgcctctccggacagctcaccgagctctgagcacagcgctctgttagcatcttggcctgtgagtgtgatgtttgatgcatcagaaagagtagggacattggacacctgggtttccttcattcatttaatcaacaaatatttattgagccataacgatgtgccatgcactgtgctaaagtcctagggattagccatttctgtgtttagaaacaggagactaggtttttggggccaactcttcagctaaaaagggctaagaatgctaaataaaatataaaaggtatcttattaaagcatcacagagctgacaagtaagctctttgtaaggaattaccaggaattattaggtcaaaactgaaggaaaaacagaagcccagagaacttagagagcatagaaactacttttgtccagagggcatttgctgatccttgaaaatctgaatttgttttctgatgatctcacggcataaggggaattgaaatccaagttcatggcctgaacaaggtggaaaatcaggtgagagattctcaccaaaataaactggaactccaaaggattcacccttggggtaagggtgaaccagagatgacccagccttaaatcatggattggaagcctcatccacacaacttgggtatgccagggaacctcaaacctttaattttatttaatcacagaatggtaacacccacagccatatgcagatgctcactagaaaaaaatacctttatcctgggctttaaattattccttaaaataaaattcaagtacaatggccaacatgcagtcaaagataaccagacacaccagaaaacaatgcataatgagctaagcactggcagtacaatgtgagcaaacaaatgacatcccttgtttcatgggacttacagcccagcagggaagacagacatcaacactcttagcaaggatactaacaatctctgctagtggaggcatttctgtgtcctcagtttactttgcttctcaacagctttcctcatgctgacctctagttctgctcttggtttccatgacagtctcttggatggcctccaacctcactggcagcttcttctcagtcatcgtgcttccttctcctcccctatttcatctctgatggtggtgtgccccagggctcacttctggacctgttctctatctctctccaggtgatctcattcatttcctcagcattaaatatcatctacttgctgatgaattacagatttatatctccagcctggatttctccttggagttccagactgtttcatccactgtctgtgacacatctcaacatgcacgtctcaggaacatctcaaacataacacatccaaaaaggaactcttgctgcctccccaactcttcctccccaaatttgctccatcgtagtaagtatcacaccaccatccagtgttaaaccaaaaacctaagagtcatcttaaacttctggacggaattagaatggagatggaaatgatgtgaagtggtcaatttagagagttatttagaaggtaaagtggaccagacttaatagattgcccattgggggtgcagggatgagagatgccaagcatgacttccagccttctggcctggaacacttgacagatgagggtgtcattcacgaagatggaaaaccccagagaagagtcagttttagggaagaggaatatgttgagtttgaagttttttggaggcatctaagtggaggcatgagagagcagctctatgtttatccttgggcttcagaggagaggttaggactgaggatactaagcttgggagtcattatagtattgatggtaatggaaaccatcagcatggatgagattgcccagggaaagagtgaggagtctgcaggtgggttagagaaggacacacctgcaaaggatttacagaaggcattattagagaggtagtagggaacacagttctttagttttatattctaaatgctgctgagagccaagtaaaatagagactggagaacatccatttgatttagcaacatggcagtcaaggtgaccttagtaagccatctcggtgcatgttgggagtagaagccagatggcagtgggctgagaagagtaggaggtgagtaaaggagatagtgagtatgatcaggcagttttctgagaggttttgctattaagggaaggggttggggagtatagggaggtatgtgcttggttttgttttttaaagatggaatctacttgagcacgtttaaatgctgatgcctacaaacctcttagagagggctgaaggtaataaggcaggagaagggagaatccatagtataagctttctcagattccaggaaggtgtgcataggctcagaaaagaggagggccatttcctctgttgcaaagaggaagaatagaggatggacatggatgtgtttcctcatctgtaaaatgggataataacagtgcctaccttggagggctgtgatggggctttgataaatggatgtttacaatgggctcagcccagggtggtcccagcaggtggtacagcctccacaaacagcagctgctattcattatcttccactctcatgactgctccactcttgcctgtggggaataataatcaaacctcacttggttacagcacttgactctttccagaggattacttttatattcatcaactattcaagcttcacaacgaacctgggattcctgttccctgtttcacagaacagggcactgaggctcagagagatgaggtggcctgcctgaggtcacacatttggtagcaacaaagctggaagtccagcccaggttccactgccaagtcaacccagctcctgccttaaatatcatcagcattaaatatcatctacatgatgaattgcagatttatatctcccagcctggacttctccttggagttccagactgttccatccatggggtaaagatgaacacagacttagggtctcaccacccctgcacagagcccctggagtataaccctgtatgggaactccatttccttcaacacctgcagtgcctcctggagaaaggattcccatgaagaatccatgactagaatccatagctttaaactcaggaagaagaggattcaggcttgaacaaggtgccagtctcgcccccctttcttgttccagcccgagaccggagattaaggaagaagatgccttatctgccagctctatcgcttgtcaggagaggggataaagtaaaagccccctcaggcctggctcagtgctgcctatctgtcaccccagatggggccctgctcacagtctggggtgagtgatttggccaaactgcactgcagcctgcagccccagcaggccctacctggggatgtaggacctgtgagaaatattctctccctctctccttccccatctgttcccagcaccatcaggtcagaatgagtgctcctatctccaagttaagacccagccctgtagcaaggtgctcgggctggctatgccttccctttctactttcttcccctaggctctctgaatagcccttcctccaagactttgctcagcttcttccctctgcctggaattcctttcccctttgctctatatggcgaacccctacttatccttcaaggatcagttcaaatgtctcctgctgcagcaagcctacctgactcccttggataaaaacaagtcttttttgagcacctactacatactggttcctgggtgaggctctggggtttggagatgaatcagacctcagcccctgcctccagaggtccagggttgcagtccagtaggaagaagtcacaaggctggaagtccctgaggaggtggatggggaaatccgcagggggtaggcttggggcagggagaatgctgacctcaggcccccagcccaagaatgaaagcaacaggccagtttccctggcagagcaggtgcccttacttgtccctggcaggctggctcctcttggcatcctctgtctgctcaaccacccacaacgggccacgtggaatggagagagggtgcacggtgtggggagcccctggttcggagcatggctctgacgtcagactgcctgtgtgatcttggacaagtcacttctctgcactttgtctccatggcaacatggcaatagaaataggatctgcctcatagggttatgtgagaagtaaatggattacattcgtgaatgcttagaatggtggttatcaagcacttgacaaaagttagctatgctcagtactatttattattttattggcggaagatttgggacccacactgtcaattcaccctgtgcactagagaagtgcatcccctctctgggcctctctccatcaggaaaatgaggagtcatggatttccagctttgatattctgtgataggaatggagacagggctggtaattggagcaggatgggaatgaataagaaagacctggggcagagcgggacactgagcagcaaggagaccccaggcagcctgctgtggtggcaaaccatgaaagatcagtttgcagaagagagttagcagccagatcacagagggcagtcagtgtcaaaataacccttctgaggggtcacagggcctgatcaattatttggcaactatgtctaatcgttagagagataacaggcctgccagagaggagtgatttccccatcactaggggaatgtaagcaggggctgagatctaagagagatttgaacatccaaaagcagcagctggggaaagaaggagtatgccagagtgcttaaacacctcagccccagagtcaactgcttccttggttgtgaccttggcagtgacctcatgctccctggccccagtttgcccatctatataatgggggaaatgatggttattgtgagggtcagatgtggtagtgttgaagttctcatgattgctggggttactatgacctctcggccttggcccctgaagcccattcctgccatctctggcctctcccctctcccatcctaggagaaagcggccggccgtgctggagtctggggctaaggaggctccagcctgaagcctccctaaggagcttgccatggttaccagctgcctgcaaagagaggccataaatcccgagcccggggtggtgggagggagggaacccgtgtgtggggtgggaatgggggcagctaagtggaattgaatcttgtttaaggaggaggcccacgcctccccaggcctgtaatttactgcgaggttgacaagatgaaagcggaattttcagtggcataatcgctgggacctcggggagctgcgggagatgagctgcgaggcaggcggtggccgccaggctttaagcaagatctggggcactgatcctgctgtgatcacagcaagcgacagaccctcggagcggggccaggcccagctggataagcccaggctcaggccacgtcttgcctgctattgtttccagggctgaggtcggcccgagtttttagcaggttttatgtgatggatcataccacccaggacggttttgaccctgtagctgctgacagccctcagccaaagtcagctgcctcaccccacgtcatgcctttaggcgggtgaggggacagaaacccatgtccaatatctggtagatacatggattcaaaggcctggccccttgctcgatttggagcatcccagctccagagttccctgtgggagcagctgaggcccctgctgagagagcttcacagttcaacttctccctccacgtggtcctgcttccctcacccctgccacggtgttcctgagaactctcccccagtgaacctcccgcaggcaaagctctggctcaaggcctgtttccagggagctggacttagggccttccctcaccaggagttttgttttaaagcagcgtttataagtagcattggagtaggatactggcaacttcttttacagatggaaagactgaggtgcaggaagggaagaaaatcatgcaaggtcacacatggtgtcaggggctcccagcccaatagtccaactcctccatttcacagatggaaagactgaggttgggagagttgggagacgccattcagctgcagagctgagtcagggaatggaagcagagtatgctggggcggaagctcactgctttggagttggcccctagccatgtggttctcagcaagccacctctcttcttgacacttttctttgttcattggtaactggagagactaaagcccatctcaggaggatggtgtgacaattgcctaaaataagagcaataagagctcacactggttgtgtgtgggaatgagcccttcacacataccttgttgaatcactgtgaaaacatgtagcagttggctcggggctgggcacacagttagtgtaccatgcttgatctctgttccacaacttgtggaccacctgctccagaggctctcaggccaacatcagaatctgctagaagctatcccagactgaggacaggctctggcaccagactttcctagttcaagtcctggcttctcccacttcctggctgtaatcttggacaagtgacttcacctctcggtgctccagtttctttatctgtaatataacaattataataaaacagatgtggcacagatgaagcaagataacctatggagtgtgcttagcagagtggtcaaaaagtacagcctcttctttttgctcatcaaaggcacagtctctggcacatagaaagcaccctattagaacatgtggaaaaaggcaaaaaaaaaaaaaagcaccctatagaccttcctgttagtactattatcatccttactgaatctggggctccagaggcctggcaatgagattttgaacaagcctcaccttgctatacaccggcatgaccctgtcctctgatgagccctgagaactgcagtttgaccttccattgtatagaagtccagggcagggacttgcccaaggtcacccagtgttatgggatcaaagccaagctccaacctactccacttgccgtccagcctagagagctttctcccgtaccacaaagggacagattctttaatgtcatctgctcaggttacaataaaaattaactatcccgaatatgtgcatcatcaaagcagctccaagacagagaaggggctaagggagactggaatgaaatgtgtcacacatgctcctggggtctccaaacctgctctgtaatggctcctaggaggccccagacacacaccagcctgcaggtccttctctgccttggtgagacacaatgctaggcacaggacgggtgctccacaagaccttcaatgagcagagctgaggctgaggcttggcccctgaatgacccaggttccagtcctctctccctgcacagctgtgcatcctacggacagcca

SEQ ID NO: 137 - DNA, 1723 bp, Homo Sapiens
ggagattccggcctggagctcccagggccgaggtcactttggtggcagttcatggagaatagcttgaggtgacaagacagcagacacgacgtgggtctctgggactgcctgtgccgttgtgggcagcccctccagagccctgagtcacgcagccttcagaggcacccatggctacgagaagcacagtctctgcctgaggctccagagcggccctttttccccagcagcagaccttgggacctgtgagcgctgcatccaattaaccatgggaagggtcagcaccagccaccagccccttaggtgaggactctgcctggggctctgctgatggttccgaatcatggagctgcagagagctcctccagcctggagacgttcttggtgaaagctgtggtctaactccaccggctcttcctgcacattgtattcaagaggggtgcctgcccccgctgactcaggagctccggtgctgcagccgccacgaatggggaggtgggccctcgatgtggcctttttgtggaaggcggtgttgaccctggggctggtgcttctctactactgcttctccatcggcatcaccttctacaacaagtggctgacaaagagcttccatttccccctcttcatgacgatgctgcacctggccgtgatcttcctcttctccgccctgtccagggcgctggttcagtgctccagccacagggcccgtgtggtgctgagctgggccgactacctcagaagagtggctcccacagctctggcgacggcgcttgacgtgggcttgtccaactggagcttcctgtatgtcaccgtctcgctgtacacaatgaccaaatcctcagctgtcctcttcatcttgatcttctctctgatcttcaagctggaggagctgcgcgcggcactggtcctggtggtcctcctcatcgccgggggtctcttcatgttcacctacaagtccacacagttcaacgtggagggcttcgccttggtgctgggggcctcgttcatcggtggcattcgctggaccctcacccagatgctcctgcagaaggctgaactcggcctccagaatcccatcgacaccatgttccacctgcagccactcatgttcctggggctcttccctctctttgctgtatttgaaggtctccatttgtccacatctgagaaaatcttccgtttccaggacacagggctgctcctgcgggtacttgggagcctcttccttggcgggattctcgcctttggtttgggcttctctgagttcctcctggtctccagaacctccagcctcactctctccattgccggcatttttaaggaagtctgcactttgctgttggcagctcatctgctgggcgatcagatcagcctcctgaactggctgggcttcgccctctgcctctcgggaatatccctccacgttgccctcaaagccctgcattccagaggtaacccagagtcccttccagaagcctctgttttctgttcttctccctgtgactcttagtgattctgatgcaggaagtgtgcccggtggctctgctgccgtcactcctctaggaagatgtgggggtcatctccagagtgggtgggtggggcctgggtgactcagcacacatgcaaatcagagcaaaccaagaaaaccacgactgggcagtgtcttttctcagagagcaggtttctttatagtttggaaataaatggttcacggtccactggc

SEQ ID NO: 138 - protein, 341 aa, Homo Sapiens
MGRWALDVAFLWKAVLTLGLVLLYYCFSIGITFYNKWLTKSFHFPLFMTMLHLAVIFLFSALSRALVQCSSHRARVVLSWADYLRRVAPTALATALDVGLSNWSFLYVTVSLYTMTKSSAVLFILIFSLIFKLEELRAALVLVVLLIAGGLFMFTYKSTQFNVEGFALVLGASFIGGIRWTLTQMLLQKAELGLQNPIDTMFHLQPLMFLGLFPLFAVFEGLHLSTSEKIFRFQDTGLLLRVLGSLFLGGILAFGLGFSEFLLVSRTSSLTLSIAGIFKEVCTLLLAAHLLGDQISLLNWLGFALCLSGISLHVALKALHSRGNPESLPEASVFCSSPCDS

SEQ ID NO: 139 - DNA, 2527 bp, Homo Sapiens
gggagtgccacgaggattgggaggggtggggcattggagaaagtattcagccaagcggaggtctgcggaagggagctgaaggcaggaagagcagcaagtaaagaaaaacacaggtcactttggtggcagttcatggagaatagcttgaggtgacaagacagcagacacgacgtgggtctctgggactgcctgtgccgttgtgggcagcccctccagagccctgagtcacgcagccttcagaggcacccatggctacgagaagcacagtctctgcctgaggctccagagcggccctttttccccagcagcagaccttgggacctgtgagcgctgcatccaattaaccatgggaagggtcagcaccagccaccagccccttaggtgaggactctgcctggggctctgctgatggttccgaatcatggagctgcagagagctcctccagcctggagacgttcttggtgaaagctgtggtctaactccaccggctcttcctgcacattgtattcaagaggggtgcctgcccccgctgactcaggagctccggtgctgcagccgccacgaatggggaggtgggccctcgatgtggcctttttgtggaaggcggtgttgaccctggggctggtgcttctctactactgcttctccatcggcatcaccttctacaacaagtggctgacaaagagcttccatttccccctcttcatgacgatgctgcacctggccgtgatcttcctcttctccgccctgtccagggcgctggttcagtgctccagccacagggcccgtgtggtgctgagctgggccgactacctcagaagagtggctcccacagctctggcgacggcgcttgacgtgggcttgtccaactggagcttcctgtatgtcaccgtctcgctgtacacaatgaccaaatcctcagctgtcctcttcatcttgatcttctctctgatcttcaagctggaggagctgcgcgcggcactggtcctggtggtcctcctcatcgccgggggtctcttcatgttcacctacaagtccacacagttcaacgtggagggcttcgccttggtgctgggggcctcgttcatcggtggcattcgctggaccctcacccagatgctcctgcagaaggctgaactcggcctccagaatcccatcgacaccatgttccacctgcagccactcatgttcctggggctcttccctctctttgctgtatttgaaggtctccatttgtccacatctgagaaaatcttccgtttccaggacacagggctgctcctgcgggtacttgggagcctcttccttggcgggattctcgcctttggtttgggcttctctgagttcctcctggtctccagaacctccagcctcactctctccattgccggcatttttaaggaagtctgcactttgctgttggcagctcatctgctgggcgatcagatcagcctcctgaactggctgggcttcgccctctgcctctcgggaatatccctccacgttgccctcaaagccctgcattccagaggtgatggtggccccaaggccttgaaggggctgggctccagccccgacctggagctgctgctccggagcagccagcgggaggaaggtgacaatgaggaggaggagtactttgtggcccaggggcagcagtgaccagccagggcaaatggcttagaagcaggccactccccagcctgctgccagcactcactgtgctcaagccgccagggctcatcatggtagctgggagctgtggacgggagtcaccaggtggtggggccaagccagggactcatgacttttgcccctcccttcagagcctggtcacacaaggggcgagcaccaggccagcctgggactggccagagctgggcccaagctgcgctggaatcgcagcaggagaggggagtgggctggttcttcccaccacttcccaggctctgacagccgagactcatttccaaggcacagcagctttctaaagggactgagtttggactgggttttggacctccaggggctggagcttcatcacctgggcagtgtcttttctcagagagcaggtttctttatagtttggaaataaatggttcacggtccactggccgccttgtgttgctggagacgtgggggcagggaggggacagtgtgggcctggcctctcctttcctttccctgcctggagccttcttcaaatgtctggtcttaagccaggcctccttcattttctcgctcctgttagaacaccagtcccctccccagtggggccccactgcacctgctggcaggaaataaatgaatgtttactgagtactgcattctggagaccttacatgttttcacagcctagtttgaatactggctttgtcactagctgtgtgaccctaagcaaatgacctaacctgtctgtgccgtagttttttaatctgtgaaatggggataatgtctatctcagagtccttttgaagattgagtcattattagtaacagattaaatgttatataagcatttctttt

SEQ ID NO: 140 - protein, 365 aa, Homo Sapiens
MGRWALDVAFLWKAVLTLGLVLLYYCFSIGITFYNKWLTKSFHFPLFMTMLHLAVIFLFSALSRALVQCSSHRARVVLSWADYLRRVAPTALATALDVGLSNWSFLYVTVSLYTMTKSSAVLFILIFSLIFKLEELRAALVLVVLLIAGGLFMFTYKSTQFNVEGFALVLGASFIGGIRWTLTQMLLQKAELGLQNPIDTMFHLQPLMFLGLFPLFAVFEGLHLSTSEKIFRFQDTGLLLRVLGSLFLGGILAFGLGFSEFLLVSRTSSLTLSIAGIFKEVCTLLLAAHLLGDQISLLNWLGFALCLSGISLHVALKALHSRGDGGPKALKGLGSSPDLELLLRSSQREEGDNEEEEYFVAQGQQ

SEQ ID NO: 141 - DNA, 2383 bp, Homo Sapiens
ggagattccggcctggagctcccagggccgaggtcactttggtggcagttcatggagaatagcttgaggtgacaagacagcagacacgacgtgggtctctgggactgcctgtgccgttgtgggcagcccctccagagccctgagtcacgcagccttcagaggcacccatggctacgagaagcacagtctctgcctgaggctccagagcggccctttttccccagcagcagaccttgggacctgtgagcgctgcatccaattaaccatgggaagggtcagcaccagccaccagccccttaggtgaggactctgcctggggctctgctgatggttccgaatcatggagctgcagagagctcctccagcctggagacgttcttggtgaaagctgtggtctaactccaccggctcttcctgcacattgtattcaagaggggtgcctgcccccgctgactcaggagctccggtgctgcagccgccacgaatggggaggtgggccctcgatgtggcctttttgtggaaggcggtgttgaccctggggctggtgcttctctactactgcttctccatcggcatcaccttctacaacaagtggctgacaaagagcttccatttccccctcttcatgacgatgctgcacctggccgtgatcttcctcttctccgccctgtccagggcgctggttcagtgctccagccacagggcccgtgtggtgctgagctgggccgactacctcagaagagtggctcccacagctctggcgacggcgcttgacgtgggcttgtccaactggagcttcctgtatgtcaccgtctcgctgtacacaatgaccaaatcctcagctgtcctcttcatcttgatcttctctctgatcttcaagctggaggagctgtccacacagttcaacgtggagggcttcgccttggtgctgggggcctcgttcatcggtggcattcgctggaccctcacccagatgctcctgcagaaggctgaactcggcctccagaatcccatcgacaccatgttccacctgcagccactcatgttcctggggctcttccctctctttgctgtatttgaaggtctccatttgtccacatctgagaaaatcttccgtttccaggacacagggctgctcctgcgggtacttgggagcctcttccttggcgggattctcgcctttggtttgggcttctctgagttcctcctggtctccagaacctccagcctcactctctccattgccggcatttttaaggaagtctgcactttgctgttggcagctcatctgctgggcgatcagatcagcctcctgaactggctgggcttcgccctctgcctctcgggaatatccctccacgttgccctcaaagccctgcattccagaggtgatggtggccccaaggccttgaaggggctgggctccagccccgacctggagctgctgctccggagcagccagcgggaggaaggtgacaatgaggaggaggagtactttgtggcccaggggcagcagtgaccagccagggcaaatggcttagaagcaggccactccccagcctgctgccagcactcactgtgctcaagccgccagggctcatcatggtagctgggagctgtggacgggagtcaccaggtggtggggccaagccagggactcatgacttttgcccctcccttcagagcctggtcacacaaggggcgagcaccaggccagcctgggactggccagagctgggcccaagctgcgctggaatcgcagcaggagaggggagtgggctggttcttcccaccacttcccaggctctgacagccgagactcatttccaaggcacagcagctttctaaagggactgagtttggactgggttttggacctccaggggctggagcttcatcacctgggcagtgtcttttctcagagagcaggtttctttatagtttggaaataaatggttcacggtccactggccgccttgtgttgctggagacgtgggggcagggaggggacagtgtgggcctggcctctcctttcctttccctgcctggagccttcttcaaatgtctggtcttaagccaggcctccttcattttctcgctcctgttagaacaccagtcccctccccagtggggccccactgcacctgctggcaggaaataaatgaatgtttactgagtactgcattctggagaccttacatgttttcacagcctagtttgaatactggctttgtcactagctgtgtgaccctaagcaaatgacctaacctgtctgtgccgtagttttttaatctgtgaaatggggataatgtctatctcagagtccttttgaagattgagtcattattagtaacagattaaatgttatataagcatttctttt

SEQ ID NO: 142 - protein, 344 aa, Homo Sapiens
MGRWALDVAFLWKAVLTLGLVLLYYCFSIGITFYNKWLTKSFHFPLFMTMLHLAVIFLFSALSRALVQCSSHRARVVLSWADYLRRVAPTALATALDVGLSNWSFLYVTVSLYTMTKSSAVLFILIFSLIFKLEELSTQFNVEGFALVLGASFIGGIRWTLTQMLLQKAELGLQNPIDTMFHLQPLMFLGLFPLFAVFEGLHLSTSEKIFRFQDTGLLLRVLGSLFLGGILAFGLGFSEFLLVSRTSSLTLSIAGIFKEVCTLLLAAHLLGDQISLLNWLGFALCLSGISLHVALKALHSRGDGGPKALKGLGSSPDLELLLRSSQREEGDNEEEEYFVAQGQQ

SEQ ID NO: 143 - DNA, 2446 bp, Homo Sapiens
ggagattccggcctggagctcccagggccgaggtcactttggtggcagttcatggagaatagcttgaggtgacaagacagcagacacgacgtgggtctctgggactgcctgtgccgttgtgggcagcccctccagagccctgagtcacgcagccttcagaggcacccatggctacgagaagcacagtctctgcctgaggctccagagcggccctttttccccagcagcagaccttgggacctgtgagcgctgcatccaattaaccatgggaagggtcagcaccagccaccagccccttaggtgaggactctgcctggggctctgctgatggttccgaatcatggagctgcagagagctcctccagcctggagacgttcttggtgaaagctgtggtctaactccaccggctcttcctgcacattgtattcaagaggggtgcctgcccccgctgactcaggagctccggtgctgcagccgccacgaatggggaggtgggccctcgatgtggcctttttgtggaaggcggtgttgaccctggggctggtgcttctctactactgcttctccatcggcatcaccttctacaacaagtggctgacaaagagcttccatttccccctcttcatgacgatgctgcacctggccgtgatcttcctcttctccgccctgtccagggcgctggttcagtgctccagccacagggcccgtgtggtgctgagctgggccgactacctcagaagagtggctcccacagctctggcgacggcgcttgacgtgggcttgtccaactggagcttcctgtatgtcaccgtctcgctgtacacaatgaccaaatcctcagctgtcctcttcatcttgatcttctctctgatcttcaagctggaggagctgcgcgcggcactggtcctggtggtcctcctcatcgccgggggtctcttcatgttcacctacaagtccacacagttcaacgtggagggcttcgccttggtgctgggggcctcgttcatcggtggcattcgctggaccctcacccagatgctcctgcagaaggctgaactcggcctccagaatcccatcgacaccatgttccacctgcagccactcatgttcctggggctcttccctctctttgctgtatttgaaggtctccatttgtccacatctgagaaaatcttccgtttccaggacacagggctgctcctgcgggtacttgggagcctcttccttggcgggattctcgcctttggtttgggcttctctgagttcctcctggtctccagaacctccagcctcactctctccattgccggcatttttaaggaagtctgcactttgctgttggcagctcatctgctgggcgatcagatcagcctcctgaactggctgggcttcgccctctgcctctcgggaatatccctccacgttgccctcaaagccctgcattccagaggtgatggtggccccaaggccttgaaggggctgggctccagccccgacctggagctgctgctccggagcagccagcgggaggaaggtgacaatgaggaggaggagtactttgtggcccaggggcagcagtgaccagccagggcaaatggcttagaagcaggccactccccagcctgctgccagcactcactgtgctcaagccgccagggctcatcatggtagctgggagctgtggacgggagtcaccaggtggtggggccaagccagggactcatgacttttgcccctcccttcagagcctggtcacacaaggggcgagcaccaggccagcctgggactggccagagctgggcccaagctgcgctggaatcgcagcaggagaggggagtgggctggttcttcccaccacttcccaggctctgacagccgagactcatttccaaggcacagcagctttctaaagggactgagtttggactgggttttggacctccaggggctggagcttcatcacctgggcagtgtcttttctcagagagcaggtttctttatagtttggaaataaatggttcacggtccactggccgccttgtgttgctggagacgtgggggcagggaggggacagtgtgggcctggcctctcctttcctttccctgcctggagccttcttcaaatgtctggtcttaagccaggcctccttcattttctcgctcctgttagaacaccagtcccctccccagtggggccccactgcacctgctggcaggaaataaatgaatgtttactgagtactgcattctggagaccttacatgttttcacagcctagtttgaatactggctttgtcactagctgtgtgaccctaagcaaatgacctaacctgtctgtgccgtagttttttaatctgtgaaatggggataatgtctatctcagagtccttttgaagattgagtcattattagtaacagattaaatgttatataagcatttctttt

SEQ ID NO: 144 - protein, 365 aa, Homo Sapiens; identical to SEQ ID NO: 140

SEQ ID NO: 145 - DNA, 645 bp, Homo Sapiens
atgggtaccattgtaggtgcttgcttccggcggaagttaccgcccgtgccgcggttcggcggcggcatccggcctcgcacttccggtggggagattccggcctggagctcccagggccgaggagctccggtgctgcagccgccacgaatggggaggtgggccctcgatgtggcctttttgtggaaggcggtgttgaccctggggctggtgcttctctactactgcttctccatcggcatcaccttctacaacaagtggctgacaaagagcttccatttccccctcttcatgacgatgctgcacctggccgtgatcttcctcttctccgccctgtccagggcgctggttcagtgctccagccacagggcccgtgtggtgctgagctgggccgactacctcagaagagtggctcccacaggaagatctgggtctgtgcgtcagacccgggccagccagccccctctcgatggggccctgctcacagtctgggggctgaggtcggcccgagtttttagcaggttttatgtgatggatcataccacccaggacggttttgaccctgtagctgctgacagccctcagccaaagtcagctgcctcaccccacgtcatgcctttaggcggctgtgcatcctacggacagcca

SEQ ID NO: 146 - protein, 215 aa, Homo Sapiens [sequence omitted]

SEQ ID NO: 147 - DNA, 2387 bp, Homo Sapiens
gagattccggcctggagctcccagggccgagattgagttgacaagaaggtgccagcaaaaaagaccaataaggagtccagaaaagcagaagaaaaaccaggagaatgtggtatcgtggcacccaagagaaggttttttctaggaggaggaagtgatccattgtgtaagcagaccttgggacctgtgagcgctgcatccaattaaccatgggaagggtcagcaccagccaccagccccttaggtgaggactctgcctggggctctgctgatggttccgaatcatggagctgcagagagctcctccagcctggagacgttcttggtgaaagctgtggtctaactccaccggctcttcctgcacattgtattcaagaggggtgcctgcccccgctgactcaggagctccggtgctgcagccgccacgaatggggaggtgggccctcgatgtggcctttttgtggaaggcggtgttgaccctggggctggtgcttctctactactgcttctccatcggcatcaccttctacaacaagtggctgacaaagagcttccatttccccctcttcatgacgatgctgcacctggccgtgatcttcctcttctccgccctgtccagggcgctggttcagtgctccagccacagggcccgtgtggtgctgagctgggccgactacctcagaagagtggctcccacagctctggcgacggcgcttgacgtgggcttgtccaactggagcttcctgtatgtcaccgtctcgctgtacacaatgaccaaatcctcagctgtcctcttcatcttgatcttctctctgatcttcaagctggaggagctgcgcgcggcactggtcctggtggtcctcctcatcgccgggggtctcttcatgttcacctacaagtccacacagttcaacgtggagggcttcgccttggtgctgggggcctcgttcatcggtggcattcgctggaccctcacccagatgctcctgcagaaggctgaactcggcctccagaatcccatcgacaccatgttccacctgcagccactcatgttcctggggctcttccctctctttgctgtatttgaaggtctccatttgtccacatctgagaaaatcttccgtttccaggacacagggctgctcctgcgggtacttgggagcctcttccttggcgggattctcgcctttggtttgggcttctctgagttcctcctggtctccagaacctccagcctcactctctccattgccggcatttttaaggaagtctgcactttgctgttggcagctcatctgctgggcgatcagatcagcctcctgaactggctgggcttcgccctctgcctctcgggaatatccctccacgttgccctcaaagccctgcattccagaggtgatggtggccccaaggccttgaaggggctgggctccagccccgacctggagctgctgctccggagcagccagcgggaggaaggtgacaatgaggaggaggagtactttgtggcccaggggcagcagtgaccagccagggcaaatggcttagaagcaggccactccccagcctgctgccagcactcactgtgctcaagccgccagggctcatcatggtagctgggagctgtggacgggagtcaccaggtggtggggccaagccagggactcatgacttttgcccctcccttcagagcctggtcacacaaggggcgagcaccaggccagcctgggactggccagagctgggcccaagctgcgctggaatcgcagcaggagaggggagtgggctggttcttcccaccacttcccaggctctgacagccgagactcatttccaaggcacagcagctttctaaagggactgagtttggactgggttttggacctccaggggctggagcttcatcacctgggcagtgtcttttctcagagagcaggtttctttatagtttggaaataaatggttcacggtccactggccgccttgtgttgctggagacgtgggggcagggaggggacagtgtgggcctggcctctcctttcctttccctgcctggagccttcttcaaatgtctggtcttaagccaggcctccttcattttctcgctcctgttagaacaccagtcccctccccagtggggccccactgcacctgctggcaggaaataaatgaatgtttactgagtactgcattctggagaccttacatgttttcacagcctagtttgaatactggctttgtcactagctgtgtgaccctaagcaaatgacctaacctgtctgtgccgtagttttttaatctgtgaaatggggataatgtctatctcagagtccttttgaagattgagtcattattagtaacagattaaatgttatataagcatttctttt

SEQ ID NO: 148 - protein, 365 aa, Homo Sapiens; identical to SEQ ID NO: 140

SEQ ID NO: 149 - DNA, 2272 bp, Homo Sapiens
ccggcctcgcacttccggtggggagattccggcctggagctcccagggccgagcagaccttgggacctgtgagcgctgcatccaattaaccatgggaagggtcagcaccagccaccagccccttaggtgaggactctgcctggggctctgctgatggttccgaatcatggagctgcagagagctcctccagcctggagacgttcttggtgaaagctgtggtctaactccaccggctcttcctgcacattgtattcaagaggggtgcctgcccccgctgactcaggagctccggtgctgcagccgccacgaatggggaggtgggccctcgatgtggcctttttgtggaaggcggtgttgaccctggggctggtgcttctctactactgcttctccatcggcatcaccttctacaacaagtggctgacaaagagcttccatttccccctcttcatgacgatgctgcacctggccgtgatcttcctcttctccgccctgtccagggcgctggttcagtgctccagccacagggcccgtgtggtgctgagctgggccgactacctcagaagagtggctcccacagctctggcgacggcgcttgacgtgggcttgtccaactggagcttcctgtatgtcaccgtctcgctgtacacaatgaccaaatcctcagctgtcctcttcatcttgatcttctctctgatcttcaagctggaggagctgcgcgcggcactggtcctggtggtcctcctcatcgccgggggtctcttcatgttcacctacaagtccacacagttcaacgtggagggcttcgccttggtgctgggggcctcgttcatcggtggcattcgctggaccctcacccagatgctcctgcagaaggctgaactcggcctccagaatcccatcgacaccatgttccacctgcagccactcatgttcctggggctcttccctctctttgctgtatttgaaggtctccatttgtccacatctgagaaaatcttccgtttccaggacacagggctgctcctgcgggtacttgggagcctcttccttggcgggattctcgcctttggtttgggcttctctgagttcctcctggtctccagaacctccagcctcactctctccattgccggcatttttaaggaagtctgcactttgctgttggcagctcatctgctgggcgatcagatcagcctcctgaactggctgggcttcgccctctgcctctcgggaatatccctccacgttgccctcaaagccctgcattccagaggtgatggtggccccaaggccttgaaggggctgggctccagccccgacctggagctgctgctccggagcagccagcgggaggaaggtgacaatgaggaggaggagtactttgtggcccaggggcagcagtgaccagccagggcaaatggcttagaagcaggccactccccagcctgctgccagcactcactgtgctcaagccgccagggctcatcatggtagctgggagctgtggacgggagtcaccaggtggtggggccaagccagggactcatgacttttgcccctcccttcagagcctggtcacacaaggggcgagcaccaggccagcctgggactggccagagctgggcccaagctgcgctggaatcgcagcaggagaggggagtgggctggttcttcccaccacttcccaggctctgacagccgagactcatttccaaggcacagcagctttctaaagggactgagtttggactgggttttggacctccaggggctggagcttcatcacctgggcagtgtcttttctcagagagcaggtttctttatagtttggaaataaatggttcacggtccactggccgccttgtgttgctggagacgtgggggcagggaggggacagtgtgggcctggcctctcctttcctttccctgcctggagccttcttcaaatgtctggtcttaagccaggcctccttcattttctcgctcctgttagaacaccagtcccctccccagtggggccccactgcacctgctggcaggaaataaatgaatgtttactgagtactgcattctggagaccttacatgttttcacagcctagtttgaatactggctttgtcactagctgtgtgaccctaagcaaatgacctaacctgtctgtgccgtagttttttaatctgtgaaatggggataatgtctatctcagagtccttttgaagattgagtcattattagtaacagattaaatgttatataagcatttctttt

SEQ ID NO: 150 - protein, 365 aa, Homo Sapiens; identical to SEQ ID NO: 140

SEQ ID NO: 151 - DNA, 22461 bp, Mus Musculus
  misc_feature (3297)..(3348): n is a, c, g, or t
atggggtatggtttaagtctgtgtttagtgcaaagctcctgcaaggtattgaacttggtaagcacttgttggcttactctgttgggatctgggaagcttgtacatttcccagtgtgttaagttacggaggtccatgtgggacatgactaattctggaatcatctttagactttactacaatgggtgtaaggggcccccaacaagatttctgaccactgtcccaatgagattaagggaccatttgtaaaatgctataatttggtttctggtaggtgacatttggagtatggagagcagctacccatagaccccaggtggcagctgctaaaggaaggtttgttgaccaggcccatgtggactcagggattttataactccagggacttctatgcagttgaaattcgggtttcaaaccaggaaagaaaattacaaagaaaaaggcctcaagtcacagcatggtgtatcatgttcccaactcccccagggacacaggttgccattctttgttctcgtggctaaggagcagggcttggctgtcagttaacccctgcagggtgggaatatgatgtttaccctctgagaaaagtaatttatgaagtgttctcctagcaacctcaaaatacatacatacaacaaaatgtaagccttaaagtcaccagaaggcttggtctcatgtttaaagacaccggaattctccccaaaccctaccagatgcagagttgaacctgtgactcttctccagccactcaatctcctgcctccctgtcttcacgatttacagagttagtaaaaaagaaaaaattagtgtaagagggacactggaggagcttttcagttcttagtaaacaatagcgccgaggatcaagatgaaatgcaggctggagggggaggaggtggttcagtaggcagagtgctcgccgtccaagcatgagccctgagtacgattcccggaacccaggttagaagctgaagattttgtgcaactgtcacatcagagctggggacacagagacagcaggatccttgccagagattggtgagctccaatcgatcgagagacgctctttcaaaacaatactgtggagacactgaggcagaaacttgatgtaggcctcccggcctccacacacaggtgtgcacatgcactcactgtgcagattgctctgttcatttggatagggccaggcagacagtatctctaacgagccctgaagtggcgccggggctactgttctgctgctgtgctgacaggaatgggcccggtgcacagtagcagcaggaggtttaacaagattgaaccaaatgtttagcctcagcgtggtcggcctggcttgtttgctttaaatgctttgaatgacatgattggagctggcatgaaagtcacaggcttgacaagatgtctggtctctaggaacattttctgaaacttggggttgagatggatacactgttaaagtcacaaatagttcccaagcatcatttagaacaaaagtgtgtagtatgttaggggcatgcatcacaccctaggggccagatataaggtaatctccagagcagaccacgtggacatgggtttaagccaatagcaagtctttattagctggccagggactacactggaatttgggaccccactgtagtcctaagactttcttggggtgggcttttaagcacaagtcatatcctgggttaaaaccctcagttagtgagaatagctagccagatgcagaactacagaagccaaaagaaaggttagtacattcagggaatctccaaggactctggtctttgatgcatcaggtctttgttctctctttggcaggtggtgctttctgcatggtgagtcccaaggtctgagtggtacttccattacagcatcagctgtgttaggtctgggggtttgttataccatgacatcaagataacatttgtcatgaaagacactttacatttactttatgtggtggtgtgagtatgcttggcccagggagtaacactattagttggaatagctgtggcattattggaggaagtgtgtcactgtgggagtgggcaatgaaaccctcctcttaaccacatggaagctgatcttctcctgtttgccttctcaacaagatgtagaactctcagttcctccagcaccatgcctgccaggatgctgccatgatccattttgatgataatggactgaatgtctgaacctataagttagccttacttaaatgttgtctcttataagagttgtcttggtgtttaaccccaattgttcaccctcttccaagtctgaatatccttcttatgaggacattggccagtcctggactagcataacctcatcttaacttgattgcattggaagaacacacacacacacacacacacacacacacacacacaccacacacttccatgtgtttttctatgcatgtggaggttcgttgtcttcctctgttactctccaccttactttttgagacaaggtctctcactgaaccaagatccatctatttttttaggctggctgtccagctagctaggagggcctgttgtctccacatccccaaggttaggatacaaatgcatgacttgatgactggctttttcatgggtcctcaggatcccaactctttttgcatgatagacactttactagctaggtgatcttccccagcccccacaatggtcctttatataaattcatgcaaatatgcaaatgttatggaaaatcaaaccacctagttctttcatttgactgtaaagtttcacaaagaaaaacacagagtgtaacttatgtgccgctgccacctccaccccatcatcctctgctctgtgatgttgattcactttctccttaatgtcagaattttctggaatatgtgcatttgtgtttggttttaaagtccatctcacccatcagagtgtggattctaaggggtgcaagacccaggccttccttgtgaccatccatttaaggtcaagagcagggcctttcatgtggtagtgtctcagataagtacattggatgagtaggtgagggaccaggctggtaaaatcgagtcttctctctcaggtccaggaggcctacctacctaatcacacctaacaaacagatgagctttaatctcagtcatggtagctgtgaacgtcctttattagaccaatgacaccttgcagtgcaatcaagttaagatgtggtcatactggaccagattggctaatgtcttaagaagaaaaggaggaagaggaggaagaggaggaagaggaggaggaggagggagagagagaggaggaggaggnnnnnnnnnnnnnnnnnnnnnnnnnnnnnnnnnnnnnnnnnnnnnnnnnnnngaggaggaagaagaggaggaggaggaggaagaggaggaggaggaagaagaggaggaggaggaagaggaggaagaggaggagaaaaaggaggagaaggttaaggatatttagacacagaagaaagcaaatacttgtggttaaactatgaggagatggaggcagagactttgagtgacaccagccagggaaagtccggggattcttgggcttaccagtgaccaaaaccccatgaagagaagcctgagcagcttccatcaggctcctgccataatgggtttcagttctaccttccaaagcatgaggacaaactgcactgtaatcatgagaaaatcaccctcaggtgaggtccgagtcttggaaagggtgaaaagtggcataagccacatgtcacccagcatgttttactctaacccaccacttctcttctgaagtgctgattattggttttgagatacgggaaagacgggacaccactacaaaccaaggaaacacattgaggctacaaagagaaactgcagaagcatactgttcccccatgcatgctgcgcagcaatgcaacctgagaatgtatgtgtgtgtcttagtcagggtttctattcctgcacaaaacatagtgaccaagaagcaagttggagaggaaaggatttattcagcttacacttccacattgctgttcatcaccaaaggaagtcaggacaggaactcacatagggtagaaacctggaggcaggagctgatgcagagaccatggagggatgctgcttactggattgcttcccctggcttgctcaacctgctttcttatagaacccaggaccaccagcccagggatggcaccacccataatgggtcctcccacccttgatcaccaattgagaaaattccttacagctggatctcatgaaggcatttcctcaagggaggcttctttctctgtgataactccagcttgtgtcaagttaacacaccaaaccagccagtacagggccagggggtggaactctaaaattagacaaagcatgtagaatttgggtttgggaggtggggggtgtgtgtggaatcacttgggagtgggtgggtggatgggggagcaccctcatagaagtgggggagagaggatatgagagggtgtttccgggagggagggagggaaaccaggaaagaggataacatttgaaatgtaagtaaagaaaatatccaattgaaaaaaaaagaattaaaaaaaaatgctgtaaacctaaaggaaatctgtaaaaatctgctgagaactgcagtataattgttgatggattcacaaagagaagaatgtccccttttccctgtgtaggactctcttctgtttattttaaatcttctcagtttcacaggacacagccacccattccagcccatccttttacactctttcaaataattatgtatcgaccatccatgctccaccagtctgacccacttctaagtcatgcatgtaactgatttcccgttgtgccttgggcatttaagacgcttcctctgctagcctgggtgcgcgaggctatagatcttgtgcgtgtaattacaaatggccatatggcggtctgtcatgcaagtgctgcatggtttgtttatccaagggtgtaaatctccgggttataacaaaaggctgaaaaccattccaagtacagaaagcatcggtggtatttcctttctgcattgtgactgagtcgcctggaatttcttcgcatcttgccaatgaataaacagtactcaggctcctcgggcatctgtcagaactaaaggtctcagatgtagcttttaggataataaatggaatataaaataataaacacaaaacaaacacatggttcttgtttaagtgggaggattacagttggcccagtctgagagctagaagtcagggtgattaaggagcagagagctgccagcgctaccatgaattatggaggacgagggagcaacagagtgggagagagccaatttgcttgtgaaaactttaaaaatgtttgccagaatccctgaggcggagtagctcaggagtaggagccctgcagcatccgtcagccttaccagaggagactgaggctgcccaggctagtttggagatgcacagtgagaagagaaaggctagacacgtgcttcaggctctgctatccagctggagctgggttcttctacctccttcaggagttgaatagtcaatcaccctctctctggaacagagggcacaggctgcttcctatggcttctacgagggtaagatgggtccatctgtctgcctgtgtacctctgccctttctttaaggaactcacttttcttgacactcttagcagtatcctgtgcctgcaaccaaggtcccattgtggagtggccctgtgcttgagggcacctccgtactgcagctcatgggtgctgtgtttcttttgctgcaactgaattcctgcaggctcccagtagcctctgtccctatagcctaccagcctttagcagatcaaaccttgcattctaaagtaagggagatacagcagaaaggcaggttacagtcatctaaaaatgtacacacatctctctcacatgcaggcagatcaataattatatatatgatatcataaaatatcatatatatatatataatttacccaatgtttattttataattaatggcacattttgagctatgtagtcatcatgtcttattttaatattgcaatcagtgggatgtactttttacagtattttcaggcttatgaaagaacagaacagtaagtggagggagttcccagaatttcctatgatcagcatcttgccctgagtgatgttgtctctgttataactaatgatctagggttttatagtattaccaaccaaagccaattgcttgcctacttcctgtccagatgtatttttggtgttttgcatcccatgagttgataaggtgccctcatcacagtctcttgtagggtagctttcctgctccaaagtcccctaggctctactcactccccattcccttattgagaaccacaaagcttctattatcaacatacgtttgccattgacaggctataatggagctgtactcttacagttcatagcccttttaggctgttttctttgaaaaaaaaattatgggcacatgtgtgtgcatgtgtgtacgcatatgtgtgtatgtatgtacatgtgtgttagcacacatgagtatgcacatgtgcatgaatgtgtgcatatgtgtgtgtgctaatgtgtgtgtgtgtgtgtgtgtgtgtgtgtgtgtgtacatgttctggtttcatttctgatgcagtgacaaagcactctctctgacaagacgaaacttagaggagaaagggtttaggcctttcttacaaatgtaagatctgtagtaatgtctcttcttacctttgtccccttgacattccctttcacccttgttcttcctctgtgccccatccccctcatcaatttttctagacccttgttaatttaatcaatcattttaaggacaagtgtcagttccacgacagctgttttagcattttccatttcattgataatcttctctgacctttatttacttctttctatagaatttgctcagctttcccaagtgttctccacacacaagcttaacttactagtttaatgcctctgggaagggaggattcttagacatgctggagaggctcgggaggacagtgaccttctattagcctaacgtgtcaatgactgtgctggttcctctgggcattcattcctttactccaaacccatacatgactactgttctcaaggctcactgtgtcttcctttatcaagagaacactgataagctgcacaaacagctccccagcacctccatccaaatggagaaaccaagtttgaccttgataacaaatgaggagttgcaccaagcctgcttgcatctggtcttcaggagcttgtgcttggtccctggggcaacatggtgcatggtgctctgcagttcctaccctgggactgcactgctcatctttgcattagtaactccttcgccagggtcttcaggtagacacagcaacactgttcactgttttctctgcttcccaggtgcactttgatgccgtagatcgatccacagggaaagttgtggatgaatccctgattttcaacattagaatcagagatgtgaatgaccatgcaccccagtttcctgagaaggaatttaacatcagtgtgaaagagagccaagccgcaggtgtgttggggtgtgtggtactgtgtgtgtacttgtctttgccctggatggcttttatttatttattttttaccttcctgctttgatattgatgaggactttgatcccggtcatccagggagacttttcacgcctcacatttttaaagttgcaggcccagaaccacagaagtcttcgctctgccagtgttggtctttccaagatgtggaagctgtggccatctggagagctggtgtgtaaatgctgcctagcaacggaggcacacctagagggacagaggtggagctgtgggaggctcacaggggctttgcaagtatcccatctgtagaatggcaggaaagtgatgtctaggatctgagcttcagaaactaagtctctacatgctaaactaacgtttctagaagaagaatctatgttttaacaagggcagtgtctaatattgtaaagcagtctttggactacttcaagaattaaaaatatggagatagacggcatttccagaagcttttaaagttgtagtattttttttttctttgtgtgttttatgcatggttacctaaaatttgtgttgtgtgtgctcatgcatgatcaggttttataaatgaatgtaaatacatgttcacacatgtactattcatgatagcagaaagtacacatgcattcattctgtatgtatatatttccttgttgttaaagaactttttggggtcagtgaaatggctccaatggtgatgtgttgctaaagcccgaggccgcaagttccatccccagcactcaataaaggagaagggagagagttatctccaggaagctggttttgttgttttgtttttgttttttttttttaaactaagaagtggagtttttattcttaatctatccattgtaagtactagtcagtatggcctcatccgttcagaaagatctgaaatcagcaactcatgtttcttagaaatagcttgcttcattctcatttttaaattttttattagatattttcttcatttacactttaaatgttatcccctttccaggttccccttccaaaccccccttccatcccctctccccctcctcacctacccacccactccagcttcctagccctggcattcccctatactgggacatagaaccttcacaggaccaagggcctctcctcccattgatgaccgactaggccatcctctgctacatatgcaactagagccatgactcccaccatgcgttttctttggttggtggtttagtcccagggagctctggagatactggttagttcatattgttgttcctcctatggggctgcaaacctcttcagatccttgggtcctttctctagctccttcattggggatcctgtggatggctgtccaatggttggctgtgagcatccacttctgtatttgtcaggcactggcagagtctctcaggagacagctgtatctggccaggaagctgttctttaaccttccctttgctctgtgccatgcatgccccatcacacagacacatagtgatgataaatatttcacttacaacacttctctatacatcttgtacactaggtttttttatggacaatctctgaggtatctcggtctcctactgcaaactgtttgttgatgccttttaaaaagtatttttgtagccgggcagtggtggcgcatgcctttaatcccagcacttgggaggcagaggcaggtgaatttctgagttcgaggccagcctggtctacagagtgagttccaggacaaccaggactacacagcgaaaccctgtctcaaacaaaacaaaacaaaacaaaacacaaaacaaaacaaagtatgttttgtagagtgcacttgaaaaacatactccaggtaagttgtgctgcagtcaggcagcattcatgaagcctgatctctggggaagaaaaggtggatgctgcaaacgagcctgaactggagagcatcacatattcacggagaacagcaataactgtgtgccatgggctgtctgtgcatccttcctattactgttaacaccttcaagcactttctcagccttttttgtaattaattgcttggtttttgttgtgtctgttttctgttaatattttctgctaatatgtttgtcatttccttcttggtcacagcttgctccttctacatgaagaacacatacttgccacaagaatttcaaatatactattcggtttattttttacttttacattttgtctgtgcattttgtctatacgtttaaaaacttctccactcttctgcgatggtaatcactactggaaagctctttgaagtttagccttggttaaatatccacctgtatcttgtattgtatgtctctatgatgaattctcatttaaatatctcatttattccggtgtgtgccctgatggcacttggcaaagacttttccctctttctactttgacaaactgccgttagccaccaataacattctcaaaaacttctttctaggtcaacctatttttcagttgttaacggtcgatttggaccaagaaaacactccaaactctcaagtcctttatttcctcgtctctcaaacgccattactgagggaaagtggctttcggattgatctcatcagcggggaagtgcgactctcgggatgcttacattatgaggttatgtagattttatcattttaaaagctccagggctggtgggctaactgctgtcagagtacttttacactagcaggcagaccctggctccagccaaggagagccatgtaaacaacagttgagagctctagcagagtccctgttgtccagagctactgaaagccacagatctagaccccccccccagaaagccacagatctagagtgctcccagacagccaggctagccaaactggtaagctccaggctccacgagagagagactcagttaaaaatgaaggcagacagtgcctgaagcaccacacccagggtggacctctggtgcgcccacacacagttgggaatcctctgtgtttgaccgttgctatggaaattgctagaaggaaatgcccttgttaatggtcccctttcctgtgtttgtgaggcttagcagtctttttctttccctgtagactgctcctctgttcacactgatcgtcagagcaagtgattgtggagagccatccctgacatccacggccaccattcatgtcagtgtggaagacagcaacaaccacatgcccacatttatggaagaccgtgtaagtcatatgctgcctgagtttcaaggcctctcacaaagggtccccaagtcctaggcttaggtgctactactgggtcatgagcaagatacatacaattatccagagtgacctaaactggaaccaaggagtctgcctggggacttaacagagtctccaggcatcgtgttctttttaatgagtccagtctgtaaagtaacccctgtccaagtgtgaggactggagaatgatagtcatatatccactgaggacaggcaggaggatgcatggggccgttggcagccatctttgcctaattggtgagccatgcatgggccttagtgggacacctgtctcaaaaagcaaggttggagcctttaggatgactcagtgggcaaaaggacttgctgccatcccgaaacccgtggaacacagatagaaggagagaactgactcctaagttgtctttgggggctcatgcaagtgtatgtgccaatcacaacaggatcaatcacaagcattgattctgagaggggcttcctttgatgacccagtaaatgccctgtaccctcctgggccctccaagcctttggctctttcatcttcctcatcatgttctatttaatgaattcatttgttctagtttctgcctaatcccctacctcccatgcatccattgtcagctcctgggagatatttattatcattattaattgttttgccagcacatagtaactgttgcattaatgattcaagcaattaattttaaaaatgtgtcatttaaatttttttaattacataaaccaacgtgggatgttttcagatgaaagcaactcatccaaatgtttacacaaatggcagaataatcttacagtgaagccttgaatcagaagcctcccctggcttaggacaaagctatgtgttcaaacgtaagcctggggaaaaatacattgctgacctgctgtgcttgctcggagacctatcgccacaaaattctgaaaatccagccatttcaaggaaccacgtgtgctggaaagatggtcaccttgatccaaacaaatctctctcttgttgaggaagagctggggtacttaaggctcgtaggctgagatgtgtactgcatctgatatctttattatgcactgactatgcttaaaatcacccagctgtagacacggagtcatgccatttgtcatgccatttgttagaaggatcccgctcctgactcaatggtattttctgctataactggaggaatgccaatacccggagcctgcgggtgtcttgctaaggacctacctctccctcctctcggttcctgccctcctcctcttgcttcctgcatccctcctctcacttcctgctctcttcctcttgcttcctgcatccctcctctcatttcctgctctcttccttttgcttcctgcatccctcctctcacttcctgctctcttcctcttgcttcctgcatccctcctctcacttcctgctctcctcctctcacttcctaccctcctcctcttgcttcctgcatccctcctctcacttcctgctctcctcctcttgcttcctgcatccctcctctcacttcctgccctcctcctctcgcttcctgcatccctcctctcacttcctgctctcctcctctcacttcctgctctcctcttctcacttcctgctctcctcctctcacttcctgccctcctcctcttgcttcctgcatccctcctctcacttcctgctctccttctccatggtgtgtctttgtgccagtgacatggaaacgatgattatttcttccagtatgagattcggatttctgaaggtcaagtcgaacagggtgtgttgtatctccctgtccaagatggagattctccatttacaccagcatggagaacacaattcaacatatgggatggcaacgaggagggccattttgatattgtgactgaccctgagaccaaccaagggttgttaagtattatcaaggtaaagtcaagaccgggttgtggtgggtgttgtagtccttgtctggaggacaagccataatgcctgaggggctggtacctgctaaacactcactgtgtgtcaagtgtgtgttgtgccctgggcaacccttagaagaatgcaggagcagatgagccctttgtctagaggccaaggactcctcttgcagaaatgataataaccaacttttaaaaatcttatttgagtgcctggtgtggtggcgcacgcctttaatcccagcacttgggaggcagaggcaggtggatctctgagttcgaggccagcctggtctacagagtgagttccaggacagccaggactactagagaaaccctgtctcgaaaaacgaaaaaaacaaaacaaaaacaaaaaacaaaacaacaaaaaaaacttatttgatgctttgatgttgctgttggaggtaaaatttactatgttcacatgagccctggaggttggatgttgttgttgttgttgttttgttttgtttttcctgatgcaatgaaagtgaacttaaaaatttattcattttcttggtaaagggtttcaagtcttggagactgcccttgaattcactatgtagtagagaattcccttaagtttctggtcttgcctctaactctgcagtgctgggactgtgggtgtgcacccccatgcttgctttgtgtggtgctggggatcaagcacagtaccttgtgagggctaggcaagggcaggactggttgggccgcattcccattccctttaaacaggcttctccaactaaaagttcttttaatctcctgggtttaaaacattttaaacatctgaagtgtaaacattggggcatgtgtgatgagcagaagaatctatctactacatgcagtggagtagctggccctggagggaaatagtcttgccatattttataggtgaggaaataaaagatcagaccgatccctttatatagagtcacatagctgagagggtggcttctgacagggcactgcaatgctgagtctttgtggctttcaaggagacacaaggatggccagtgcctttcatcgtacagcaaatcaattgcaaggaccagctggagtcaatacatctggtacagtcgagagtttgcctgttagttgaacaagtttcaggaaataccaaggagtgacagtccacactgtgcatagcaaggtccctgacagccttctgcacagtcgcctgccactgagttatttgtcagaagccatctagaaaaggctaagatgtgcaagtgagttttctggagatgagctaccatctttacaaggccttcagtgggagagctgtgagatgcaaggtcaccaaagacttcattctaaggagacacgggaaacctgcctctgcactttcctgccatcagcagtcagatctccccttccccactttcccagcatagatgcctctggcctttggagaggtcaaacagaaaggggccagcctggcactggaatattgcaattcattttttcatggtggcactcccttccccataacgacctccctggggcggaggttggggatggaggggcagcggcagatgccagctttgggaacagacaaaaaagcaacataccctagtccctgtgtcaccaaggctaacactctccttgatagataaccaacatttctccagtgcagatggctcctgcccttgaagggaacaaggaccagacattcttgaattgataagaggcccactcttagaccatgagaaaagggcaattaagtgttcctaaacagctgtgaccagtttgtaaaaatacaccagcttctgataataccataaaattactttccaggtcaagaaggtcccctcccagctgcatggttccatcctgatgtctgaacaaatgttatcaggtttaaaacatggctttcccctgtcacctctccagtcatacaaacccaaagatagaggatccctgcttgtatatatatatatatatatatatatatatatatatatatatatgtatatatatgtatatatatgtatatgtatatatatgtatgtatatatatatgtatatatatgtatatatatgtatgtatatatatatatatatatatatatatatatatatatatatacacacacacacacacacacacacacacacacacacacacacacacatatatatactccaagcccctagacacaggcatcatatccctaacctgcccagtggggaaggcttttgatttaggtctggcttgtgaaataaaggctctctttgtttttacatcggacttgtgattcctggcattcttctggggttcctgtaaactggacataacaatcccagattgctttttgctgctgatatgcctttcctgtcactattacatagcttaatgattcctgggtattagcccacactattgagcagattttctgcagatcaacatgaagatgtgctctgatgtagtagtgctatatagatgaaatgatgatgttatgatttctgatattttttagaactcttaaattgatacaagtaatttcaacacccccctcccatagaataaatttacaaatagagctttgtaaaccttcatgtgtgatggaccgattgcagtaggataataaagccggtttggaacaaatttgtgatcaatgaaaaacattcattctaggtcaggtccaaggatgaagccttccgtgttcactatgataaagcaaggccatgtgaaactgttgctttgaacttataatgagcttacagaatgaaacactgctttgaccttaatattcacatcctctgtaactcccttttgtgtaacattttatctgtgaggtgattttatggaaaccttttgtctaagaaggaataaattgccaaagataagtaataaagtgtggcatttggggctcagctccatctaccaaatgtatatctgtatatgaatctatgtctatatgtatagatatgtgtgtagatatatttgtatgtatgtaagtatgcacaaacgtttgtggaattgatgagacaagaggtctggcagggccaaagtgtgtgtatgtgtgtgtgcacgcgcatggattcttcttttctctttgactcacaaagagttaacgagctccaagcctctcctggctagcaaggggcccttgagccagagagaaactaagtctttttttttttacttcccccatgctatcagctggaatcaaattaccagaagccagaggcttttggccttagaccagcaaagagttaaaggaagacaaaaattaccagaagtaagcatctcttgaccacagaatggcaaagagttaaagacaggagaatctccaaagagaaagcagctttggcccctgctgactccaaacccctttgctgccttcctgggggaaactgggtgtctggatttagcccccagcagttcttcaaacctcctgactctcagcccttccatgtccctggccactttgtaccctgagtaactatgatcattagtatctatatttctccaagttcctctgatttttttttcctgtggtatggttaacacttaaatgtttcatgagttctggtttttgttgcatttttcatcaccgtctgatggatggaggctctgtgcagccaggagaggaggaggaaagagtgagccccataagtgatttgaaagggatctgaagactggcttttgatcatttccatcctctgttggattcctgatgactctgcggagcttcctgcagccaggggagcagtgggtactaatcaagcctcctcttaccttggcagcctttggattatgaatctcaagtagcccatagcctcgtcgttgttgtggagaatcaggagcagctcttcgtttgtacggagggccagctgcagccattgaggaaggcgatggccagcaccatggtgagcgtgcaggtgctggacaccaatgacccaccagcctttcaccctcagagcttcattgtcagtgaggaggatggagcctggcccgccatccagctgggatacttcaatgctacagacccagacagggctgacagccagataaggtgggcacagaggagcaggaatcatggctggctctgagggggcagggaggggactgttggacacctgaatgctacagaatcttgctaagactggttcagtccaaggagtaaaagtgtaaggagctacctggtgaatgcccattggctggattaatccaattcattattcagctcctggctgggttagcctaacttccattcttactcattagcccaactcagttctacccccacccacagctccctcctggaccccccttattctctttgcccattcatagccatatatatattacatattctgtaatgtggaatagtggtacagatgcatagtggttagcaaccagacatgcttccaatgggtgtcatctgatggcagccactcccagaaatcctagagtcttctgcctactgcttaaaatggttccatgtccacaaggtgaggagtacgaagatgatcctcaggtgagggaatcctttgggatctgctacaaagcagacactgcaaaaggagtcagacttgtgtgtccgtggtatgctgtactgagcaggaagccaccacctactgatacctgaagactggttctgctcccatattaagtgtttcccaaggcacacctcctaggagaaagaaacttattctagtgatcctagacttggcacactgttgaagtcttctctgtcatcccaagccttcgagctcagagtacgtagatgagcatttgggtttcaattgtctttgaattactcgcagtgggaattgtagttaccttagggtttctattgctgtggagagatgccattaccacagcaaatcttgaaaaggaaagcatttaactggggcttgcttgcagtttcagaagtttagtccattagcatggtagcaggaaacatgcagatgggcataaagctggacaagtagccgagagttcttcatccagatccacaggcagcaggaaaagcaagaacctctggcttggcttgggcttcagaaacctcaaacttactcccagtgacagacttcctccaggaaggccacacctcctaatcctttcaaacagtgctactctgtggtgaccaagcctacgtggtcattcttattcaaaccaccacagaagttttataatatattttgatttgttattaaaaatattttttgaggcaaggtcttgaactcatggtcactagactctatatcccaagtgctgggaagacaagcatataccaccatgcctatgatttgtcttgtggtaaaacttcgtagttaaaagaaaaatgtgtgtttgtgtgtgttctctttacaagatacaaactggttcatgatccagaaaattgggtgaccgtggatgagaagtcaggagtggtgaccaccaagaagcaaatagaccgggagtcccctcatgtgaatgacagtttctatacaatcatcgtccatgcagttgacaacggtgagtggggaggcaagactgggaatgaacagtgctggctctggcctcctaagggaggccatttttagcatcactgaggaaattataaaataaacattgttttcactttgactctatgctagagattatttttgataataactcccataatggcaaaccagggaccaatactgctgaaagaggggcagtgttcactcagcagagacaattaagccagtgaggagtctgcaatcatgcccacccgtctcatctgcccgtaagataatgcagtagctctttgtcaagcccaacgatgtgtgataaatatttagcagtttcccgtacctgggacggcttgtaagctccagcaaatgtgactgagtggaacacatttgtcataaaccaggacgagtgatttttaaaacatgccttagcacatttctcaatattcccacaaggctgaagttaaacgcatccaaatataaagctgcatgtgtgaacattttcaagtaacattaaggatcatacttaaagaactctgtggatgaaagcccaagcactgtggacccgcccagcccatttgcataattatctggtggaatgttagggaagcaagatgctagccgatgtacaggaagggaagccagccattcggcactcagggttccatgattctgttatggatggcttcatgattccctaatctatttttaattacaaaaggtgatttctaaatgatcataaatttgttgccatggtcctatcctgccctcccttggggtccccagtccatcagaataattcagaaatgatgtcctggagtggagagacaagagagtttattacagaggaaagtgggcacctgaatgaatgagagcggacagtggccatagggcccactgaggaggaaagcaaattacgcttggaggagagtggctagtggccagagagaccaccaatagctttcattgttggtcaggcctcttatacttttcctacagtctctaaacctggctcttcctcgagggggcatttccctttccagtgtctgtaaggtctttgctcattaccagaaaacctttagtgggtagcaatgatcaacaggcagtctgattgattgccatgtctccaccttgggccagagtcctgcgtttctgtccctgttttcaccaactgctgatcataagggaagatccatcctccatgatccacaaagctgttagtatctgaacttgactcacgtgtggttttagcatcacagcctccttttcccagctttccccagtacactttataagatggtgtagtctgtcatcataggcaatgtccccacaggctggagctgacctcatcttccctggggatcccccatgctcccctttgagaggtacccaattccttcccagcaccactgcacgtaccatgactgactgacaggacatgtgattctatttctacttcttcttttaaaacccatcaggaacagttcatgctgcccaatactccgatacttgtgtgtgtgtgtgtgtgtgtgtgtgtgtgtgtgtgtgtgtgtatgcgcgcgagcatgcccgagtgatcatgattgcactggaagagtctaccaagcagggccacaccctgacagagaggctatggactctcacaggcaccccactcttcaggagctactgatactactgttctgtaagttcatgtttaccctctctctttaatattgtaacttctattgcctgggttctgtcctctccaaggccttcccccgctgactggcacggggactctgatgcttttcctatctgatgtcaacgacaatgctccaaccctccggccccattcccgacacttggaggtctgtgagtcggctgggagccagcccctgctgatagaagctgaggatgcagatctggacccctacgctgacccctttacttttgatttggacaatgctcagggagacgtggaagagacttggatgctgaggacaaagcagggggaaggtttgtatgtgttggaggctaattcagactggaacaaactgtgatttagggtgggggacactaagtcatctagtctcaagtacacttggagagcctaaagtctggagtgcattttgtgggagaccagccctgccagaaaggactctggacatgaggtctggggtgaacttgcctcagtggggtattacatgcctgctgtcactgctggccttcttgacaccatggatgaagatggctgcacactcagatgtcggtctcttctcttctctctcctaattttcatctgggtccttgtccttgtagtgaagagcagcaatggctgtaacaatgtgaacggtgctctttgagtccaagagcatgctaccacatgagcttttgtggggaagatgtaaagaaatgtctacttatcccagttagagagactgacaggccaaagggaggacttcatcctagcccagcttgacaagatgggggttcttacaggagcatggatgagtcaaaggcagcatcctgtgggtgtaggcagcatctgtgggtgtaggcaggattcaatgggtatagactggattctgtgggtatatgcaggatcctatgggtatagactggattctgtgggtataggcaggattcaatgggtatagactggattctgtgggtatatgcaggatcctatgggtatagactggattctgtgggtataggcaggatcttgtgggtgtaggcaggatcctgtgggtgtagacaggatcctatgggcttaggtaggatcttatgggtataggttaggccctattggtagaggcaggatcctgtgggtctaagttgggtcatgtgggtattgaaaagatctaggcaggtatgggcaagatcctgtgggtgtgtagatcagatcctggaactttttaaaggtgcttgtttagatagtataatttacagtaaagtttaaaggttacaggcatttcttctatcaataaagttgtaacataggttcatgaggagtgttgcttatattcaagaataaggggtgctgaaaactcagggctgtagatcattttggcccaagttagcacactttatcttgtatcctcatttgaggtgtggttaggaaattatgcgctgtccttgttgaaggcaattttgaaagcatcaatgggtgtccagcaggaaagactatccagttcctgggacaagggtcctcttttctgtcctatctgctccttgcttttctgagtttctgtcttgtcccactctcagagccacagccctggacagtagcaaggagatacacagggggccaatgagctcactcatgtctttctgctcttgcaggccactctgctgaactcacaatgctgagaagcgtcccgcccggggattacttggtgccactcttcatagctgacagacagggcctcgcccagaagcagacagtccacgtgagaatctgctcctgccgcagtggctctgaatgtgaggagccttcggacacatggctcctgtggtgggccctgtccccagttggtgcagcacttatggttctgtcaggtgagtgcttcctgggggctcagcccctttcactggccacaggacaacaggacattctctgcacgggtgggagataaggacgaactccaggctagtgcaggtcagaggtttccagacacgctaattaaccgaaattcagtttccatgtgcaggcaattatgtaaacaatggaatccacagaggaacatggtccaaaggtgagcatatgtttgcggtaaccatggttacagcagtgcacaggtgtctaggtgcctgagcatggctgaggttaatatgggcaccgattagtccaagaaacaatagaatattcttggccagttaatatcaagcagtgaattcaacacaagtgtaggcatctgtctgagtccccaacacgctgttaagcctcacagtcagtcctgagatggttcaatggaaccagaccctgtcaggtagcagctgagtggaagtgaacggagcctggccccccttgaagcctcttgcagagctgagcttgcacaattcttttctgttttatcacagctgctctcctttgcctgctgcggtgctcctgcacatttggacccaagaggctcagaggcttcatcccaagtgacagtggccaccagacactgattgtgtataacgaggaaagcaaagtcccttcagcccag

SEQ ID NO: 152 - DNA, 1662 bp, Mus Musculus
atggggtatggtttaagtctgtgtttagtgcaaagctcctgcaaggtattgaacttggtgcactttgatgccgtagatcgatccacagggaaagttgtggatgaatccctgattttcaacattagaatcagagatgtgaatgaccatgcaccccagtttcctgagaaggaatttaacatcagtgtgaaagagagccaagccgcaggtcaacctatttttcagttgttaacggtcgatttggaccaagaaaacactccaaactctcaagtcctttatttcctcgtctctcaaacgccattactgagggaaagtggctttcggattgatctcatcagcggggaaactgctcctctgttcacactgatcgtcagagcaagtgattgtggagagccatccctgacatccacggccaccattcatgtcagtgtggaagacagcaacaaccacatgcccacatttatggaagaccgttatgagattcggatttctgaaggtcaagtcgaacagggtgtgttgtatctccctgtccaagatggagattctccatttacaccagcatggagaacacaattcaacatatgggatggcaacgaggagggccattttgatattgtgactgaccctgagaccaaccaagggttgttaagtattatcaagcctttggattatgaatctcaagtagcccatagcctcgtcgttgttgtggagaatcaggagcagctcttcgtttgtacggagggccagctgcagccattgaggaaggcgatggccagcaccatggtgagcgtgcaggtgctggacaccaatgacccaccagcctttcaccctcagagcttcattgtcagtgaggaggatggagcctggcccgccatccagctgggatacttcaatgctacagacccagacagggctgacagccagataagatacaaactggttcatgatccagaaaattgggtgaccgtggatgagaagtcaggagtggtgaccaccaagaagcaaatagaccgggagtcccctcatgtgaatgacagtttctatacaatcatcgtccatgcagttgacaacggccttcccccgctgactggcacggggactctgatgcttttcctatctgatgtcaacgacaatgctccaaccctccggccccattcccgacacttggaggtctgtgagtcggctgggagccagcccctgctgatagaagctgaggatgcagatctggacccctacgctgacccctttacttttgatttggacaatgctcagggagacgtggaagagacttggatgctgaggacaaagcagggggaaggccactctgctgaactcacaatgctgagaagcgtcccgcccggggattacttggtgccactcttcatagctgacagacagggcctcgcccagaagcagacagtccacgtgagaatctgctcctgccgcagtggctctgaatgtgaggagccttcggacacatggctcctgtggtgggccctgtccccagttggtgcagcacttatggttctgtcagctgctctcctttgcctgctgcggtgctcctgcacatttggacccaagaggctcagaggcttcatcccaagtgacagtggccaccagacactgattgtgtataacgaggaaagcaaagtcccttcagcccag

SEQ ID NO: 153 - protein, 554 aa, Mus Musculus
MGYGLSLCLVQSSCKVLNLVHFDAVDRSTGKVVDESLIFNIRIRDVNDHAPQFPEKEFNISVKESQAAGQPIFQLLTVDLDQENTPNSQVLYFLVSQTPLLRESGFRIDLISGETAPLFTLIVRASDCGEPSLTSTATIHVSVEDSNNHMPTFMEDRYEIRISEGQVEQGVLYLPVQDGDSPFTPAWRTQFNIWDGNEEGHFDIVTDPETNQGLLSIIKPLDYESQVAHSLVVVVENQEQLFVCTEGQLQPLRKAMASTMVSVQVLDTNDPPAFHPQSFIVSEEDGAWPAIQLGYFNATDPDRADSQIRYKLVHDPENWVTVDEKSGVVTTKKQIDRESPHVNDSFYTIIVHAVDNGLPPLTGTGTLMLFLSDVNDNAPTLRPHSRHLEVCESAGSQPLLIEAEDADLDPYADPFTFDLDNAQGDVEETWMLRTKQGEGHSAELTMLRSVPPGDYLVPLFIADRQGLAQKQTVHVRICSCRSGSECEEPSDTWLLWWALSPVGAALMVLSAALLCLLRCSCTFGPKRLRGFIPSDSGHQTLIVYNEESKVPSAQ

SEQ ID NO: 154 - DNA, 115779 bp, Homo Sapiens
ctacggcgatccaagagaagatgggttatcaccaccttggagctggaggaggaagacccgggaccctttcccaaactcattggtgaggtaaggtgcctactcttaaggaatgaccccatcatgccctctaagtaagcacgcccctttggccaggaagattaagtcttgaaaggttatgtgctagtgaggccagggagtgaagtagagcagaaggagcactggcctggggttcaggaagcctgggttctagaactcactctaactctacctggttatgtgagtttgaacgagtcacttctccatgtgagtgtctgatgagaatctcatacagcaacagggtggttaattccaactgacaggtctgctttatttggcccatgcagaggctttttttttttttaaatattatttaaaaacagggagattgtcggccaggcgcggtggctcacgcctgtaatcccagcactttgggaggccgaggcgggcggatcaggagatcaggagatcgagcccatcctggccaacatggtgaaatcttgtctctactaaaaatacaaaaaattaaccaggcatggttgcaggtgcctgtagtcccagctgctcgggaggctgaggcaggagaatggcatgaacccaggaggcggagcttgcagtgagccaagatcgcaccactgcactccagcctgggcgacagcgagactctgtctcaaaaataaataaataaataaataaataaataaataaataaataaataagggagattgtcttaaaaattttgcccttctaaagacttttaaaaatggaaagttctggccacaaggaacccacattcccacattacaacaattaggcggggcttgagttactcagaataccagtttccacccctccctattgcctccctcatgctgagggtgagcactgccttgaagaagtcacatggtattggaatagcagaatctttacaccaggctcatgttgtttatttccactaccttcctagtaccaatgggcctttgaattaagtgctgattaagttctgctatagctgtggcattctatgattcttagaagaaggaaatagtgcacgcctactgttaaaaacaaacataaagagtacagaaagttttcaagtctcagtggttaaaagtgtatatgcctaagagtcagggggagtgagtgggttcatattcctactgcaccacctccttgctgggtaagttagagatttttaacgtgtcctcatctgtacaatgcggtcaatgatattgcctacatttcagagatgttttaaagattaaataggttaaggcaagcaaggcatattgtaggcccactcattctaagctctttctaaatgttagttgtgtgatcactacttctctttccttcaagggataattgatattaataaattggtatgtgtggttccagatatttctctacagattttctgatgtgaatctgcatccaagaaatgagatcacacttggtgtgttgttctgcttgcctttcttgtttagtgatgtgtcctgctagtcattccgtggcagtgtaaatacatctttaaaggctacagagtatcccatgctatgtgaaggaagtatcattatattatttttttcatgttgatgaacatttatgctatttccaaattttcactgttacagaccaaactgaagctaacagttcaacatcattgttcctgcatctcagcccatctgtttatttctttggcagatgtgccattgctgggtataatttcttaaagatgccattgattcttagccttgatacttgattatcatagtggcttattctcatcctccttttttcttctttccatttttcctccttccagctgttcaataatatgtcttataacatgtcactaatgtatctaatcagtggacctggtgtggatgaatatccagagattggtttgttttctctagaagatcatgagaacggaaggatatatgttcaccgccctgtcgatcgagaaatgacaccatctttcacggtatctaaaacttgatatattctaagctcggatttaaaagctcttgcaagactgttgtatttggtaagcattatttaagctgactatgtgccaggttccgggagattgagaaattatgccttgtgacaagctttacgagtatgcctgagacttttgtaatcttcttttagagttgtggactttggctttgtaatgatttctgcaatcgatgtgagctgctataggtctttattctaatgaccagtgtcctagcatgatcgggatatcagaaagcatttgggtatagggtcacagaatgtttataaaatgggctaatttattttttgatgagtgacttctgaaatatggagacaagccataacagacccaatgggttgcccaataactgatgcatgagcagttgcatacctgttgacaatgtcttattgtgagtgcaggtgttctttacgatttcatcactgcaacactgtggtttactatgaagttgaaattcaggttgtaaactaggaaaggaaattataaagaaaaaagccctgaaccatgtatcacattactcacctaacatcataggaagtccttaggtagtcaaactttgttctattttgacttcagtggaatggagctgctgggaactgggcttggttctcaggcgtgcttggctgtacatttgttcattaactctttcagggtggaaagatgttgattaacattcaagaaaagtaatagttgaagcttttctccagtgatctcaaagtacttatatacacaataaaagatatacccttaactcactgataggctctgaatctctaatttttaaatcggtgaaaattgttctaaaactccaatgaacatgcaaagatgactctctaggtcttccttatctgtatgaatgcatgcctcccttctgtgcagaattcacagtgtctgttaaaaagaaggacttttaacagtgcctgttaaaaagaagagtagtcataaggagaccctgagatagcacttctcaatctttcatgagcaaacagatcacctagggatcttggtaaaaatgcagattctgttttagtaggtcagggtgaagcctgaaagcctgcatgtctagcaagctccaggtgatgcccatgctgctgttcctcgggcttccacacattgagtagggaggacctagtgatggtcatggtctgtgcaaggatggaaccaaacattcagtgctcacttgttgttgttgcttgtttgctttcaatattttattttttcctttccttttattattattattatttttaactttcattttaagttcatgtacaggtttgttatataggtaaacttgtataatgagggtttagtgtacaggttatttcatcatccaggtattaagcctagtacccactagttagttttcctgatcctctccctcctcccacccttcaccctctgagagactccagtgtctgtttccttctgtgtgtccatgtgttctcatcatttagctcctatctataagtgagaacatgcagtattggttttctgttcctgtgttagtttgctaaggataatggcctccagctccatccatgttcctgcaaaggacataatcccattcttttttatggctgcatagtattccatggtgtacatgtaccatatttgctttatccattctaccattgataggcatttaggttgatttcatgtctttgctactgtgaatcctgctgcaatgaacatacccatgcatatgtctttatgatagaatgatttaaattcctttgggtatatacccagtaatgggattgctgggttgaataatatttctgtttttagctctttgaggaatcaccacactgtcttccacaatggttgaagtaatttacactcccaccaacagtatatacatgctcctttttattctgcaacctcaccagcatctgttgttttttgactttttaataatagccattctgactggtgtgagatggtatctcattgtggttttaattttcatttttctaataatcagtgatgttgagctttttttcatatgcttactggccacaagtatatcttcttttgaaaagtgtctgtttatgtcttttgtccactttttaatggggttttttttcttgtaattttaagttccttatagatgctagatattaaatctttcagatgcaaaagaaactatcaacagagtaaacagacaacctgcagaatgggagaacatttttgtgaacgatgcttttaacattttaaatgatgtattaagggttggcattcataatgtctaaaatgggactttgtgtctaaaagctgataatgctaaagccaaatatctaacagcatttcctgaaactcgaagttgagttggaaatgcttggtgcatcacagatagatcctaggcaccatttagagcaaagagtgacagtgtggggtggggggaaacacatggcatccccattaattctgttatgtcaggttttcagggccctatgcttggagctccctggctaggccaaacccatgttctgatcccccaaacattgaccacagttgtcttttaatattgatttaggtacttatttgatccgtggccctgtcatttaactacagacttccacaaggaaagatacagggtggggattctgaggcatgccccaaccttgcctgtcactctccgtctcattaccctgttttattttctcctcaacaccactcatcacctgaaatgtgaattttgtgtttaattatctgttgatagttgatctcctccattagaatgctgatctcccctcttagaatgtagttctaagaggggagagactctgccttattgttgactttggggaaagtctgccattgccccagggtcaagatcagggctcctcacataataggttctcccttaatcatgttagatgaaggagtaaatgaatgaacaagcagagtaaaatgtagcctcggccttgctgggtgttgtgagttgaattgtgtctcccaaaaatacatgttcaagtcctaattcatggtacctacccctgtgaccttatttggatatagggtctttgtaggtgtaatcaagttaaaatgaggtcatactggattagggtgggccataacccagtgaccagtatttttagaagaagagagaatctttgacacagagacagacgcagaggagaatgccaggtgaaggtggaggcagagattagagtgatgccaaggaacactgaggtttgctagcaaccacccgaagccaggagaggcccggaagagtctctccttcggagcctccagaagaaccaaccctgctgactcctccatttcagctctagcctacagagctgtgagagaataagttcctagtgtaagccatgggggtctatggtattttgttacaacagccacaggaaactaacagccaggggcttacacactatttaggagcatatgaaatggtccaatgagaaggattaccaacaaggaagggtggcataagacatgtcctataaattaggacgtgtcctaaacactacacaaattgagcatcctagcttaaccatctgctcctgtaagagagcgtttattgttggctttggcagtccatcaagatagtacattattaaaaatcaagtaagcctaatgtagtggcaaaaagacattctagtagcacttctttactcttgagcatcctgatggggtctctaaaaccagccaaaagaaaaattgtgttcagggggtggtgtgggggaggctaacatttattaactccatgcatgtacaagaaagcagtagccctggttgagaattactgtaagatttgagacagaggacagcaacagaaaaagtttcaatttttttctgtgtatggaccttatctatttatatcaaaatatgctcatttttgtagaatacaaagctaccccaaaacccatctttttatatttctcaaaataattatttgttaatttttttcaccacacagtctaacctatgcagtagcgattttgtgttgtgcatttggcgctgaaggtgttcctatgtgctcatttgcatgtaaggccgcagatcttgtgcctgtaatttcaaacagccatgtgatgtatcaagttaatgcaccatggtttgtttatccaaaggtataaatcttgaggctataaccaaaggctggaaacactttccaagtgcagaaaatgtccatgacatttcttttctccattgtaacccgaatccctagaaattcttagcatcttgccaaagaataaacagcactcatgtttctcaggcatcttatggaactaaaggtctcatacgtagctttaggataataaatgaaatataaaataataaacataaaacacacaagtggttctttttttaaatggaaggagtacagttggcacagttttacagccagaagtcagggtgattaaggagcaaagagttgccagcacagtcatacattatggaggagaatgtagagatggtgagtgagaaagccaatttatttgcacaaaaatttaaaaatgtatgctggagtccctgcagcggactagctcagtggtagaagccctgaagcctccctcagtcctgctgtgggggaggaggagcactgacctgcgctagacgtaggggctgctgtgctaggatacctggtgggaccacggtgatggaagcagaggaatgagccacaagtctgcagggaaagggggctcaggcagtcatgcgaaacagtacagagggaaagacatttaggcccctgaggaaggggatggagagagtgttgcctaaagctttcaaggcccttagaggccccctgggagggccaccgaccctgggcactgagtagccatagagtgaagtgaggaagaatcggcggaaggtgcagtcttgatccctgactggacttgaatctgggctactctacttccaagctgaaggtgaaatagtcacttagtctctccatggtgcagagctggacagcaagggtgccttcctccagggcttccgcggggatgagcagaggccatctacgggaagggctggtgctggtgagtccgccctgggcctggctgaagctggcagccaggcttctgcaataaacctttttaccccaagcaggatactgtacctggcgaccagttgacccttgagaatccagtggtctgactgcagaacaggcctctgcctggaccaccctcgtgccaggatccgtgccctttcccactcccttttctgcgactctgaactcctgcctttgcccacagccttttcagccttcaacaaacaaaagcaccctttatactagagcaatgagagattcaggagcaagcctgattcgacttgcttttaaaaatatgtatatttatttaaaatacacatgtatattttcttatagttcatatttattatattttattaatatatatatttattttgtaagtagggacatcattttttcaaattaatggactttattttttagagcagttttagattgacagaagcacagaacagaaagcacagttcccatcctcccctccccctaccccctcccttcagattcccctattatgaacattttgcagtagtgtgtgcatttgctataatgtatgtgctacatttgctataattgttgagccagtattttacatgactattaaccaaaacccatagtttacattaggcttcactcttggcatcttacgttttatgggtttcgacaaatgtgtccaccatgacagtgtcgtatagaatagtttcactgctctaaaactctctgggctctgcccattcacccctccctacccccagaacccctggcaaccactggtctttttactgtctccccacttttgccttttccagaaggttatatagttggaatcatacactatgtagccttttcagactggcttctttcacttggcaatatccattcaaagttcctccatgcctttttttcattgtataatattctattgtgtggatggacacagcttatttacctattcacctactgagaaacatcttggtagcttccagagtttgacaatcatgaataaagctataaacatgtgtgtgcaggttgtcaggtgcacatacatattcaacacatttggaaggctgatagttggattgtgtagcaagagtacatttagttttgtaagaaactgccaaactgtcccccaaagtggctgcaccattttgcattctccccagcaataaatgagagttcctattatttatacttactttttttttttttttgagatgaagtcttgctctgtcacccaggctggagtgcaatggggtgatctcggctcactgcaacctctgcctcctgggttcaagtgattcttccacctcagcctcccgagtagtgggattacaggcacccaccatcatgcctggctaatttttgcctttttgtaaaggtggggtttcactacgttggccaggctggtcttgaactcctgacctcaggtggtccccccacctcggcctcccaaagtgctgggattacaggtgtgagccaccacgcccgatcttatatttactttttacatataaaattaatagggcttcttacaaaattttgtacaatatatgaaaaatctcaccccacccacaacttttctctctggtctaattccacagaaggagaaaataattacagagaaaatataacattcactcttcacttattagatttgatatgaagtttttaataacttctttgacaatataatgacctgagaaccctcaactgcctttattccttccaaatttatatgtattttacttttaaaaatttattttcaaaacttgtgtacggtaaaatttgtatctcttgatgtatagttctaagagttttgacaaaccctccttcaacccttaacccctggaaaccactcatttcttctccctcccaatacatttaccttgtttagaacatcatagagacggagtcacacaatacatggctttttaagtctagatttttttcacctcacataatgaatcttatattcatcgatgtcattgtgtgcatcaagagtttcttcttcttctatttttttttttttttttttgagacggagtcttgttctgtcgccaggctggaatgcagtggtgcaatctttgctcactgcaacctccatctcccaggttcaagcaattctcctgcctcagtctactgagtacctgggactacaggcgcctgccaccatgcaaggctaattttttgtgttttagtagagatagggtttcaccatgttggtcagaatggccttgacctcctggccttgtgatctgcccacctgggcctaccaaagtgctgggattacaggcgtgagccgccgtgcccagccgagtttgttctgttttatcgctgagtagtatcttgcttctcactttataaaactaaagggtgcttggactcttttcaattgtggtgagataaagctgctatgcacttttttttttttttttttttttttttagatagagtttcactgttgtcgcccaggctggagagcaatggtgcgatctcagcttattgcaatcttggcctcctgggttcaagcgattctcctgccttagtctcctgagcagctgggattacaggcacccaccaccacacctggctaatttttatatttttagtagagtcggggtttcaccatgttggccaggctggtcatgaactcctgacctcacgtgatccacctgcctcagcctcccaaagtgctgggattacaggtgtgagcaaccatacccagcccacatatggcttttatgtgaaagtcagttttcatttattgtaggtagatacctaggagtggcttagttggatcacataagtgtatgtttaactcgataagcaattcccaaacgatttctcagaataactgaacaattttgcattctcattagaaacgtataagaattctgattgctctgcatctttggctgcacttagtattgtcaggttttttcagtttagctgttctaaaaggtgtgtagcgatatctcattgcagttttaatgtggatttccctagtgacaaatgatgacttatttactatctgtatctctttttttggagaggtgtctgttcaaaccctttgcccattttaaaattgtattgtttttgtctttttttttttgagatggagtttctttcttgtctcccaggctggagtgcaatggcgcaatctcagttcactgcaacctccaccttctgggtgcaagcaattctcctgcctcagcctcccgagtagctgggattacagttgcctgccaccatgcctggctaatttttgtattttttttagtagacactgggttttgccatgttggccaggctggtcttaaactcctgacctcaggtaatccacccggctaggcctcccaaagtgctgggattacaggcatgagccaccacacccggccatatattgtttgttttcttattgagttttgaatacaaatcctttgtcagcatatgaaatggaagtattttctctcaggcaattgtcttttcatttttgtcttctcattcttacctttgtcttttcattcttttaacagcatttcttacagagcaaaagttattacattttgataaaatccaattcatcaatattttctcttctggatcatgtttttggtggtgttatctaacacattgtcatcaagattttctcctttttttactaaaagttttatagttttatgttttacatgtatgtctgtgatccattttgaattaatttttgtctaaagtgtgagatatagacccaggtttatttttttttgcttatgaacatctaattgtttcagaatcatgtgttgaaaaggctagcctttgtattattctcaaaaatcaatcaaccatacttgtgtgggcctatttctaaactctctattctgtttcagtgatgtatatatttatcttttcatcaatactatactctctggattactgtatttttataataaatcttgaaattatatagtgtgagtcctctaactttgtgtttctttttcaaaatgattttgcgtattcaaatttctttgcctttctatataattttcagatcagcttgttgatatctctaaaatattctgctagtcttttgattgggatcatgctgactttataggtcaatttggaaagaactgtcatcttggcaatactgagtctttcagtctgtaaacacagtatatcttttcattcaattaggtcttctttgatttctttcatcagtgttttaacattttcactaaatagatcctatacgtattttagatttgtaaatggagctgttttaaaatttttatttctaattatgcattgctggtttatagaaatatagctgatttttatagattaactttatatcttgtgacattgctgaaattgattttcgaaagttgaatcagcctaaaattctcaggataaacctcatttggtcataatgtactatccttttaatatatttctgggtactatttgttagtattttgttgagaacttttaactctagattcatgagagatattgttctgtagttttccctgtaatttacaaaaatttgactttgtattatggtaatattagtctcatataatcagttgagaagtttttctaccttttatattttttggaagagactgttgaattggtctttcttctttcatattttgctagaatttatcattgaagtcatctgggcctggagttttttgtttttatttcttgaaagattttaaactataaatttcactttaaaaaaatatataggactatacaggttttctgtttcttcttgagaaagttttcgtagtttttctttattaagaatttggtccatttcatttaagttgctgaattcattggcataaacttggtcatactagtccttattcttcttctaatatatgtagaatctctagtgatatcctttctttcattctcgttattgataattctctccgcttccttattttccctcatcagtccccctagaggtttattcattttattgatcatttcaaagaatcgcttttggttacatgcgattacgttggttactttctctattgttttgttgttttccattttattgatatgtgctcttacctttactattgctttctgtttgtttggatttattatgatgtctttttaaaatttcttaaggtggaagcttaaacaattgatttgagaccatttgaagtgaaagatttcacacatgcatatttgacgtggactgacttttcttatccaagtacagaagtaactgcagtggccatttaaaaatatagcatgtcagtagctgtgctagttactataaatgttcactttcccaaaaatctttaactgtctgctctctgtgatgtttcagtaatattcagttaatatatttatttctcatgacaacactgataggttgtagaaacggaggctcactagcaacttgcatgtgtttgcccagtggagagactgagatttgaacctaataataactgatcatttttttccaagccagagcattggcttgttctacacatttgctgagcacctaatctgtgccagtactgttcttgctctctggggtacttggtaaatgagggcagtctgattcctgccctccggaactctcagtctagaggaggagacagacgtaacacataattaggataacagttattttattagagtgtcatcgagtaaatggttctgcaggatttttacagctctctgcttcctaggtttattttgatgttgtggagcgctcaacaggaaaaattgtggatacatccttgattttcaacattaggatcagtgatgtgaatgatcatgcaccccagtttccagagaaggaatttaacatcactgtgcaagaaaaccaatctgcaggtgtgtgcggctggggggctgccgggcttccttctgtctctgctctgttccttttcattaatattgatgaggagcttgatcctagtcatcttcagggagagtttttactgttcacatctcaaagatcgcaggccttggatctgagcgaaatgctttgaggtccgtaagcctcattttgtatcggcaataaaatgatgtgggaattacatcagtgggaagggttgatatgtaaatgccattctaaaaataaagccacatgcagtgagggagaaagagctgggtgatgagcttctgcatatctctgcacattttttgtctgtaaaatggcaacacgatcacatctatagcctccgagttacagatactgtgcattcttaaacccaaccgactcttactagaatgtggatttattttaataacaaaaatcatttttttgtgtaatcatctctccaaaaaattccaagaaatgaaaagactgaaaaagaaagcatctttaatgttacccatgagagataacaaccattagtgtttcagtttgtattctttcagcatttttgtgtgcattttctgtgtgtgtgtatacacatgctgtgtgttaaaattatatatgtgtatgcattcacacatttttatgtataattacaaatgcatatttgtatatacatacattttttcatctttatcatagtacacattgtatatgcgtatatggtaaatatttacacatatttggtgtgctttttcacaggtgcatatttataaatttcctctctaaaggtgcaattttactgtttgtaacctgatatttttctaaaataccctgttgtgtaatattttatggatgtgctttaaagtatttgaccgatctcctatggttgaacatttatgtttttttgccactttctgttattttcataaaatatatttcaatgataaaatttaagctaaatctgtgtcccaatcaagcattatttacttagcatgaattcagagatgtagacttgctggtttgcactgtgcatacaatgtaggggtcctcatttgctgacctgcccccagtccacgaagatgcttggtgtgttgttggtctttgataactatgtgcttgaacattttgctatgtttcttcaccatttccatgttctatcagttgctttttcctttcttttcttcatttttctgttagtgtgtttgtcatttttcttgattttaacctctgcagtctatattaagaatatctgcctgccatgtatgtttcagatatattttcctgctttatcattttcttttaaattttgtccacagttttttgccagaaattaaaagtgtaatctgatccaccaatgtaagtcttctgcattggcagtcatgattagaaagttcttgatcttataactaattaaatattcatccttatcttttctagtatgtccatagtttattttatatttaaacattccactcattttggtatatgccccaatgccatttagcaaataattcatcctcttactggtttgataggctacctttatctgatagtaacaatttttaaaaattctttctagggcaacctatttttcagatgttagcagtcgatttggatgaagaaaacactccaaattctcaagtcctttacttcctcatttctcaaacaccattactgaaagaaagtggtttccgggttgatcgccttagtggagaaatacgactctctggctgcttagattatgaggttatgtggattttattattttttttaaatgaaatgtgtggcccatccttgagccccaggcttagattctacatttgtagtggggaaccctctgtggctagatttgctattgaaattcctaaacagaatatttctttattaatattttcctttcctgtatttgaggggcttaactttccttttcctcccacatagaccgctcctcagtttacactgctaatcagagccagggactgtggagaaccgtcactgtcatccacgaccaccgttcacgtggatgtgcaagaaggcaacaaccacaggcctgcatttacccaggagaacgtgaggctcctgggccgccccaacgtctaagccccaaaacaagtagcccttgggtcctaggctcagtttttctcagagagggtgttaggctgttatcatattgctgtgaagaaatacctcagactgggtaatttataaagaaaagaggtttaattggctcatggttctgcaggctttacaggaagcctggggctggcaccggctcagcttctagggaggcctcaggacgcctatgatcatggcggaaggacggggggagcaggcatgtcactcggtgacaacaagagcatgcaagacacgggaggtgggtggggaagaatgaggaacgagagaggtaagaggggccacacacttttaaatgaccagatctcatgtgaactcagggccagagcttccttatcaccaaggggatggccggagctatttatgagggatctgccccacgatccaaacacttcccaccaggccccacctccaacactggggatcacatttcagcatgagatttgggcggggacagatctccaatctatatcgcgcagtcacccaagatatgtgcaattctccaaagtgacttaagctagaatcaagaagccaaatcatattgacatagaagcagttcataatggtcacatgagcttacatttttgactgctgtatgccagaaactatgctaagaacttttacatgcatttttttcatttttgattattgaaactacaacacgatttctgttttacagatgggaaaactgaggtctaggggaagacagggaattcctgtttacttggagtcaggggttcctatgctcagcccaactgacactgggccagatgattatttggagtgggggctactctgtgtgctgtgggatattcaccagcatccctggcctccgcccagtagatgtcagtagcacccctcagctgtgacaaccaaaagtgtcaccagacattgccaaatgtccctcagggagaagaatcacccttgggtgagaagtctgcacctgaggttttcacaccgtgttcaggattctagagggaaggtgagcaggtaggctttggcctcgccttccataccttaccttatccaagtacagaagtaactgcagtgatcatttaaaaacattgtatgtcagggtccacatgggatttcccaggctgcaagactcccagcctttaagaaagcattgaaaaccgctgtgtaagatggtttgggatgggtgccccacctaaggcatgtgagatggctaagagataaaataagaatcactcaagatctatttccaatattttattttttactattctatatgtatttttaaaaaagtaaatatccaccatatttcctttctcctgactctctttcttgactactgagttaaaaccctccctcttctttcctgggacacactgtagctcctttgtgctttcttctgcttagtagtgttctacttaatcagttttatttattttataaatccccctacacacacacacacacacacacacacacacacacacacacacactcagctctcagctccatcaaggacggaatttttgcctgtcttgttcatggcatctgaaatggaatgtggcacatagaagctgttgttgaataaatgatgcaaacaattatttttaaaaggtgtcgtttaattagaaaaaaaacctgtataaaccaaagtgaaatgtttgcaaaccaaagcacctcaccagaagtatataataactacaaaataatattatgcttgaaccttgtttcaaaatcttttcctggcttggtaaaaagcaatgctctcaaaaatatggctggaaaaaaaatataccctcttattttgaagtgcttgtctagaaacattgcctccaaaagtattgaataacaagctattttgaagatctacatgtgttagaaaaatgatcaccttaatctgaataaccacaagtgtcctattttaggggaagagctaggatttttagagagcataaactaggattgtgtattattatttttaaaattcttagaaaaaatagggcattgagttggatttaagagtactttaagaattatttagcgagtcacaggtaggagggggcagatattccaacggatgcaccttctgctgtaacagacggagttgcaaatcccttagggcaggtttagcagcatgaggaatatccagggtgttgtgatgaggagcaacattctttctccttctctctcttgctctctctctgcttctctccctccttcctctctgctttccttttcaattgtgtttttgtttccatgacatggacatgatgattgcttctttcagtataaggttcagattcctgaaggccgagccagccagggcgtgttgcgtctcctggttcaagatcgagattctccatttacatcagcttggagagcaaaattcaacatattgcatggcaatgaagaggggcattttgacatttcgactgaccctgagaccaacgaagggatattaaatgttatcaaggtaacaccataccggtgacataccaaccagttagtggcagacgctgaggcctcttctgtaggatcactcacaatgaaccagggagctaacgtccgtggatgctgggtgctgagcccattacgtaccacacgtcaccaggcaaggaaggcagggtctcagtgccacttctgtgtgtgggctgaggactcctcctaccaaaatgatatcaataataaaacttattttgatatgactaaatacttcaccatttaattttttgttgttgtaggcaaaatgtaatagatttacataggccttaaaatgattattctttttcagatgtgattaaaaaatgaaaacattttcttcaacactaaaagttctttcttttcatctgagttttcaatgtttaagacttttaaagtttaaaacaaatgggagtgcatctgtgtggctccaagagtatggagagcccctggcactgtgcctaatggagaagctggcctggaagaaagtattaatattaccatctcatttactgattaggaaaccaaagcccagaggggttaggtcctttacacaaagccacacagcttgaggggtggagtggaggatcccactggggcagtctgaccccagtgcctctagtcttcattgctcacaaccagccctagagtgaccagggcctctagtgcagtgcagggcaggtgagtcacctggcgacaaggcagacctgagtcagcaggtctggcacagagcccaagattcgcctgcccatttgaccagctcccaggggatgctgatggcctgcggaccgtgctatgaatagcaaggctctgtagacgctgcaccagatgcctggggttgaattttcaaaatattcccaggctttcaatccttttaagtcaactgaccactttgtaccctgaataactatgatcattaatatctatatttccctaagttcccctgatttttttgctgcatggttgtctcattaatgtttcattaggctatggtttttgttgcatttttcattaccctctgaaggatggtggctcttttcaaccagcagaggaggagggaaaaaataaaagagaaaagaactccataaatgatttgaaaatgagctgtagactgtcttttgatcattatcaaagacaacgtaaataataaatgaagtgcaaaagccacaagctctgagtttgcaatgatgactcggcgctgggcttcctctggccagaggagcagcaggtgctaatgaaatcctctctctggggttccagcctttggattatgagactcgcccagcgcaaagcctcatcattgtcgtggagaatgaggagaggctcgtcttctgtgagagaggaaagcttcagccgccaaggaaggcagcagccagcgccactgtgagtgtgcaggtgacagacgccaacgacccaccagcctttcacccccagagcttcattgtcaataaagaggagggcgccaggcctgggaccctgttgggaacttttaatgccatggatccagacagccagataaggtgagaagagagggccaagaagggcggttgtttaagtggaaatagccacataaccaagagggctcctgttagaaaaccagctcggccgggcgcggtggctcacgcctgtaatcccagcgctttgggaggccgaggcgggtggatcatgaggtcaagagatcgagaccatcctggctaacaaggtgaaaccccgtctctactaaaaatacaaaaaattagccgggcgcggtggcgggcgcctgtagtcccagctactcgggaggctgaggcaggagaatggcgtgaacccgggaagcggagcttgcagtgagccgagattgcgccactgcagtccgcagtccggcctgggcgacagagcgagactccgtctcaaaaaaaaaaaaaaaaaaagaaaagaaaaccagctccttggacgtgttcacgaggttgcctcagtctccgtgatgaaaatacaagaagccacagtgcatgaccactgacctgagttaaatgtcgtcttctatccataggtttttctgaccccagcagaagaactcacttgttggttttcctttgcatcttccatgtgttccttttgtattctttcctttgtgttagaataatccgttacatttttctgtctccccctctgtaccagaagttataaaccagtacctctcttgcttctgggcaagaaaagtgagggttttttttgtaaattgtggtaaaatatacataaaatttaccattttatccatttgtaagggtacgggtcagtggcattaagtgcattcacatcgttgtgcaccatcacctccctccatctccagaactcttttcatctggcaaaacagaaactctgtctccattaaccactcattcccccttctccagctcctggcctccaccatttgactttttgtctctctgagtttgatgactccaggtcatcaaagcagaatcatacaacatttgtctttaggtgactggcttatttcactttgcataatgtcctcaaagttcatgcacgtttagcatgtatcagaatgtccttccttctgatgctgaatatgcatatgtggtattgacacatttttgtttacccactcatccatcgatgggcacttgggtggcatatggcctgaatctcttgatgttcttgaagaaatggaagaaattggcatttttgggtctatgttccatgagaccatgatcatggggacagaaaggggtcatgagtcatgccccttctctctccaggctgagctcagcagttggccccagaccccattccaccagcttcactcatttctcgtgcttacttggccttggtccacacttcagtgtgagattcctctccttacagcaacacttctcaacttatctgttgggaatggctagattttttaaaaatttacaattcattatggagtgataagtttgcaaaatataatgaaatggaattactagaaaaattttcatgcactaggtggacatgacaatgctgatgactctaagggcttctcaacacttgctcttcatttttgcagttatctcattgtgagcagccaaccaacagctcacagaccccttctggtgcacagtggtgcaccttgagttagcaaggctcttaagaagtagctgtcaaactatagtgtgtatcagtctctgggggaacttgttaaaatgcagattgctgggccccacccctacaatttcttttcttttttttttttcttttttttgagatggagtctctctctttcacccacgctggagtgcagtggcataatcttgactcactgcaacctccacctcccaggttcttgtgattctcctgcctcagcctcctgagtagctgggactacaggcacatgctgccacgtctggctaatttttgtaattttagtagagacggggttttgccatgttggccaggctggtttccaacccacccatagaatttgattgagaggtctggggtcaggactgagatttgcatttctaagaagctcccaagggtgcccatgatgctggctggggatccctttaggcaccaccaacaggagcctttcctaattcattgctgtcttcctgtctcttgaggatggttggctcatacttaggtctcaggaaatgtttggactgtgctgaaatcaagaactaacagtccatcattttagcctcaatatggctttttccaggaggcaggatgagtgtcttttgtgacagggtggaggcatgatctgggttgggggcagctttggtttcctctagttctgcttcatctgcattagctgagggagctgccttttggcctgagataatccacagaggaactctgagtttcttcccctcgtttgtaaacattgcaaaatcacagtgcttctaaggaacttctggaactttccctaagaggtgaagcagtgcacaaaaagcttcaatccctttaaaaactgtgacccacgcaacatgagagagggatccttgctgaccctttgaaaaacatttgcccagaagatgaaggaaaagcataaggagaaactgcccctctccgcacctttctgggacctgcactttttgttgttgttgttgtttgcctgagtccaggaggttcctgctgcggtgccctcaacaggtagctggggtggcaacctggcaaggttgcaaaggatgcaatccaatggctgacagctctcaggaatgctggagggcttggcgtggcccaccccttacagtggtgtcaggttcacataggtgagggggatgtagaagaccactttgaggaatagggttacccaactgtgaactgccagggctctgctgcaaagggaacacaccaggggtaaagtcctaggtttctgttgcaagggcaggttggtttttcacactaagctaacatcatctacaggccactgaagatgggttcctttccaggatgaatcatctccccaaggcagacaaaactatgttcagtccaacaaggagggggacgcttggtcttctggtgaatgtcaattccacagacctaggagagtctttaggctgtcctccctgtgcttccattcctttcgtgaattaaacactctcgtagtttaattgctcttagaatttctcaaattacttgtggtagaaatagtgtttctatgacatattttgtttttttatgcaacttttttatcttttaatgtaagtttttaattttaaaaattgctgtccgttttccttctacaagatatgaactggttcatgacccagcaaattgggtcagcgtcgacaaaaactccggagtggtcatcaccgtggagccaattgaccgagaatcccctcatgtaaataacagtttttatgtaatcatcattcacgctgttgatgatggtgagtgtttacccaaaattggaaaaataaaatgctcattcttgcttcctgcgggaaaataaccctggtgagcgtctttcagcacagcagagaaaaggataaaataaaccttgttatcactctgcatccatgctggtgattatttttggtaataattcttaaaatggtaaacaagggaccaataccatcgaaagagggcagtattcattcagaagagacaattaaaccagcaaggaggctgcaatcaaacccagcatctttttcatctgttcatgagctaactctttagctctttgtcaaagccaatgatgtgtgataaatatttagcacagcttccctgtgcttgggatggcatacgagctcagataaatgggactgtaagggacacatttgtcataaaccagaatgggtggttttataagcctgtttcagcatttttctctacactctcctaaggctgaaactttaaacacaccaaagcagagttgaagaaataaaaatgttcaaataactttaaaattgtatttaagaaagtctgtgaactaaaacccaagctccaagtgatatatcactatacgttccattctgtaattaactagtggaatgttggcggggggcaatggagatatgaaacacgtgttcctaatcagcattaagggaggagaaaaaatggggccagtgtttcagggttccgtcattctgttatggatgattttatgattggtactttttttttcctttattttttgctttttgtatttcaaaagcttttggggtacaagtggtttttggttacgtagatgaattatgcagtggtgaagtctaagattttagtgcactggtcacctgagtagagtaccttgtatccaatgtgagatttcttagcccttggctccctcctcccctgcttctgggtctccagagttcatgatatcactcatgcctttgtgtatccatagcttagctcccacttataagtgagaacatacagtatttgattttctattcctgagttattcacttagaagaatggcctccagctctattcaagtgtctgcaaaaaaacatgatttcattcttttttatggctgagtagtattccatagtatacatatgccacattttctttatccactcattggtcgatgggcatttaggttggctccatatatttgcagttatgaagtgatgattgccacttttttgaattagaaaaagtcgttttagataattgtagattcacttgcagttttaagaaataatctagtggatcctgagtatcctttgccagttttccccaggggcaacaccttgcaggactacagtgtaaccttgtaaccagtacatcaacgcggagacgcagcgcatttgcctccccttggggacccccatggtgcccttctttagtcacacccattttcctccaccccacccatccttgatgcctggcaccattgattgaccttttgtttttttaatgaagccacattctaccttgttctacaagtgatttgaggtggtaagtgctttattagcttacccaaatattctgaatgctcataaaagcaggaaaacagatcacgtgcatgccaggagagcttatgacgttgaaagggaaacagttccagtatttcaggaatattttttttctgagagacggagagtgctcattctccagagctgtgtgtgcacgagataaacaactcctgaaacttcctccccatacaaggcttcccaccgcagactgctacagggaccctaatgctcttcctgtctgacatcaatgacaacgtcccgactctccggccacgttcccgctacatggaggtctgtgagtctgctgtgcatgagcccctccacatcgaggcagaggatccggacctggagccgttctctgacccatttacatttgaattggacaatacctggggaaatgcggaggacacatggaagttggggagaaattggggtgagtttttgtattggttacgggcaaagagtggaaaatgccagatatccaattcaaacagatttaggcaaaaaaggactttattagcttaaaaaaccggagaggtctgcgttctggcagagctggctctaggtgctcaaaggatatccctggatatccttcccacacatggtctgcctttctctaggttccttcttttttaggaaactctcctcatcagggggtaggaggctgctgggagtccctgagacatattcttgcatctggcaagaagggtgtttccagggaagctccaggattgacgtcactgtttggcctgggtcagctgccctgtcaatcactgtgggtgggacttgggagggcggatgtgctgattggctggttcccagcccacacctggaccttgttgggatctgggctcaccctctcctgattcatactgagaattcaggaagtgtgggcttccctaaggaaacactggggcactgttaccagaagatgaacatgctgagcaggttaaaagcaactggcatccactgtcaacactctcttctgtgcctctagccgtggcgtctgtagactgtggcacggtttcagctgaaactgtgtgctcaagtttgtagttctcagacctggagtgtgtggtaaagcacttcgccttgcccaaagagaggtctggtctttgtccttggggtctgggtgatctctattggggtatcatgtctgacaccagtgtctctttacctggggtgtcttgggctgagccggataggggcaatgtgatttacactggggacttctggtcacatagtatcagtctattaccagagaggctggagactgaggccgcccacctgggaggcccaccaggttgcctgaccaagccccaggaggacactggagcctgaggctcaggtgaacgtccctgactgcagcatcccatgtgtgctgtccctcatcgatgctgacctggcttctcgggagtggatgatgagaagctctgctactggtgcttttctggactctgccctaggtgcctctttccttgtgtgatttacatctgtatcttttccctgtaaaaaacggcaccatcactgtaacaactttcagtgtgttctgtgagtctttctagagaattgttgaacctgagggtggtcttaggaatccgtgaacttgcagttgatgtcagaagtgagggtacccttgaggacccctccctctaactctgcagttggcttactttcatacagagcttggcccgtgcagggcgttcagtaagcgtgtgttgagcagatgagcagatgagtgagtcaatgcatgccatgttctttttccctttgcaggtcaatcagttgaacttttaaccttgagaagcctgccacgtggtaattacttggtgccactcttcattggagacaaacagggactttcccagaagcaaactgtccatgtaaggatctgcccctgtgccagtgggctcacatgtgtggagcttgcagatgcagaagtggggcttcatgtgggggccctgttccctgtctgtgcagcatttgtggctctggcaggtcagtggtctgtaggggtgtcctgggactgtggctcctctccccaggcaataggccaggggtaaggggcttgctggggtaggggacagcggtggcaggattggtggaatggctttgagaatgacttctgggtgtactcaggctcctagatgtagatcagaggttgccatgctggccaggcaagatccctggccagcaaaagcagcttctactcacaatggaatccactggtaaatatagtcaaggagtggccctttgtttgtaataaccatggagacagcaatgtacagatattcaggctcctggacttggcaaggctaataagaaagcagcttttccaagaaacaatacaatattactggccagatagtattattgattaattcaacaaacagttatgtagcatctactggtaccctggaactgtgctgaactttatagctacacagatgactaagacgcaatttggccttgccagttcatgactgagttatacatgaacagaacaagatcctcatgaaacctctgatatgggtgagcttgtctaatctgtttttcccctttgtcttataacagtggctctgctttttctgttgcgatgctattttgtgcttgaacctaagaggcatggatgctctgtatccaatgatgaaggccaccaaacactggtcatgtataatgcggagagcaaaggcacttcagcccaggtagtggaatgtcatgctttgtgtcttatggcaaggaattcactaatacacagacatatagcatgtatttttccccccattgtgccacctcttaattcttcactcttacccgtgtttcagtagcaagtgggaaaaaattcttgcaaatactatctaactcagataaatgaatttattcttttagatcaatggttctcaaccatgagcaattttgccccataggagatattcatcaatgcctggagacagttttgatggtcacagttaggagtgctactggcatctagtgcgttgaggtcagagatgctgctaaacagcctacaacgcacaagacagcctctaccacagagaattatctgccccagtttcctaagtgctgagtttgagaaactgtgcttagggaaatagtgttttttattaagtagacgttccctaaatgggattgtgttaggctcactagttaaatgagtctgagctggcttcttggccatggctttcagtagatcatggcagaacctgctcttctaccattgtccggcaaaggccaaccagaaagctcactgcccttggaggtacaaggcctaggctctgtttctgcttttgcatctcattagcttcatcatttaaccctacatcctcatctgtgaactgggatgataaagtcaaattcttagataggttgtggatcagagaggatgcctatgaaggcacctaacacaaggcagagccatataaagtaattggccaatggccactggtttttcaaactggctgcttctgaaatgggccctacattatcttagtcatccttgcagcaaccctgggctggggttagacagacaaagagatgaaagcattgtgagctctcctgtttgtcttcatctagaattaagtggttgatttagaaaatgaacacaaaagaaatgtcaaaaggaaacacacacagaggattcggtcaccccatcttacacctccaccaatgtttttttcctggaagggagagacttattgaatgaagtcagacatttagggaaaagatattccaatgaacttgatatgatgctcctgtaattagagagtttctcaaaaatatttgattgaagaagctggtgctcgcccaaggctcccagggttctttgaattttgtcttccctgcggcatgaaggagggaagggagcagccacttaggctcctctggcaggtatgtgcctgtgcaccctcctgtgagcccttcctgggtggggaaacaggagcaagatccaaactctccagattgtgaagtcccctggaaggaatctccgcatcccaaatgtgagagcagcagtaaacttgatttgttgtgtaattttaagaagaaaaccatctggacaaacagcagtctttgtgtaacagtagaatttcttgccttggacagttccagtggctcagaggctcaaccatgaagggaaacagaaatggttcccagtcccaggagctgtgcctcagtctcctccttggagggagagagtgaaagctgctgagcttggaggagactggcaggaatgtcacacaacctgagttcaggttgtagctgaggtggaagggacagtggggatgccctggttacccttctttcccagcagctttgtgattgtctcttggaaaagaggaagcagctatggaagcagtgtgggtggaaaggaaccttggcccttgtgatgctaagaccaggagggttggagggggcttaatgacatggtggcactggtcaaagaccagctatgccagtgggacaagagaacctcatgctgggcaaggggctctgttctcttcttgtaccaacaaatctttctcttgtttcccattcacagctaaaggcacatctccattcctgcttcagtatcttagggctctgagaagtggaattcaacagacctgggtgtagattccaaatctgtgattgatcagttacataatctaactgaatctgactttcatatataaagtgagcttgatagtcttctgtctcttaagttttttggactctaatcaaataacacatgtaaaattttcagcactaagagtcatgcaataaagggtggccgccaatattagcattattagcagtaattactgattatatctctgtaaccttggtaaataaggccatctctaggtgcacttatccctctgtccatcttacatgaatataccagcttaccttgcacatccactcaccaggaacattctgtgctcttgggaaaactccatgcaagatatcgtcactagctgcacacatgttgtcacattctactactaaactatagggatgccatctgatggtgatgatctacagaaatgcatagatgccttccctgcatgtggggaagctaatgagcccttggccaacagaaatccagcacccatcaacctgagtccctcagtgaacatatatgttgagtgataaatgaatgggacaatgcacagaataccatgcaatgctggtgaccccaagagccatcaccatgagccctaggaaaagacaagcttttcaattctgagagctcctgaaatgagccttttaccatcagtttacatggaaccctgaaccatgagaagctcaacctcccagcgagcaattacaaaaggcaaacagaaataacattcttttcccacataagtcatccagatttacaggagaggtgtattttttacagtctggacttcttctgtgatggcatagatacaatgtgttttggagaaaatgtcattcctttccttctgtttttatttctgctatctgtgatttcagcccttgtcatatttctttctctgtgttctacagacatggtcagatgttgaaggccagaggccggctctgctcatctgcacagctgcagcaggacccacgcagggagttaaggtaacatgccccttacttgcttctggatttcagagaagtgactttcctggtggtttccctgacaaggaacacctgggatgctcctcccagtgccacatccagggaggttcttcttcaagtcagcaaccccagcccctacttgcaaagccccatggttcccttagcctaaaacacccttgtctttcagtggccaagttctttctactttgctgcggtgtcagatgaccctgtgcttccaaatatcactgtgtccagtgccatatggtgattttttgccatatgcatatggcacttggactagtgtatttcttaagacacttttttcttaaaatgggcttgtgtccacattaagtacatttatttaagtaggaaattttatatttcaactgtaaatgaaaacagttttacttgtataaagagcaggcaagtgtgaagatagccatgaaagaagtagggcacaatgactgggtggacgatggcactgccaaaggcccggggcccctctgcaaggaaggcagagcgtggaagccaggctagcaccagagtgacacttcctcctggatgtcataagggtgtggaaacagaattagaaagggaataattttctcaccgtgcaaatcagtgttatttaaaattgtttcccaagtagctaaatcttccattctataactagtaggtgtcccctactttgaaaacaaagttgacccaggattgccataaatgagcatgtgcctggccagggcagtgaggagggctgggttcgccgtgcattctgaccactagtctgtgctcctgggggaagggctgcccttttctagttcctacaaacttgcctcctgggctggcgagagccttctctttccttcctctgagccagtctgcaaacttctagaggtctaggtgttgccctgaggggcacactatgcactttgcatgcctcatcttattgaattttcaccagaacccataggggcgtgtgtgtggtaggggcaatcttgcttccctattttacaggggagggaaccaaagcctccaccttctaggttttggtgtatctctgggttcccttcagtgtcctgcaaatattgtagtaagtacatctctggtgactgcttaaataaactgccattcacacactttctctaagtgaagccgtcacttatgatttatggggtaacctgatactttaaaatctgctggatagtgtgaaatagcgtcaatgagaccattgtcaaggtccattgcctgctttattttctttgaaatataacttcattattgaagcgtcactattaaaataacagaaacccaaggcagaaaatgcccacaatcccatccctgaatctaaacagtttcacctgtgagtgtcaccttctagatgtcatctgcgtgtctatgcagttttcaggtgtctgtgtcatggaaagaacattagcgtcttcatgttcaaacctcctcctgccatgcggttccattgtgcctgcccttttatccctgcattccctgcctctcttcattttccttttcctcccaccgcgccctccctctcatcgtgttaatttgtgtttgcctatgaatatatgagcaaggggaagtggtgagaggtcacgcatgcccactttgtttccagctggagagaaatccattctcttttgagtaaatcagcattttccctctaggatctcgaggaagtgcctccatctgcagcgagtcagtcagcccaagcacgctgtgctctggggagctgggtgagttccagaaggttgctccctgctacggccatctcactagtgactaacagttggtccccctgagagagggccgttgtagaagattcggtgatactgtcagaaaaaggcacatagtcaatgaaaatctgagaagctgggctttttccacccgactctatttccatctatagaactaggtattattattggtgatggctgctgtttttagagttgtttgataatcctgatcaaatatgacactttttagagcatccacaaatagatacattttctcatgtccttctaagggcaccagagatcatctataaagttaaaagcacagcactttggccctgactaaattccagcccagtgactgcatgcttccagcgaaagggaggcctgacttcccatctgtgttgtgtcttcttgtactctacatacaaattccaggactattgctttgtgaaatgactttttctgaaataattttagactaaatagaagttgcaaaaatagtttggagagttcttgggggtcccccaaatataccatcttatgtaaccctactccatgatcaaatcagaaaatgggctttggcacaacactgtgagtacagttctcagtcacagaccttatttggacctcaccagtttaactagccattatttaaccaaaatgtacttttctgatatagaattaaaagaggtattcagggtctaaagagccatagaatcatatccaatttttatgagggaaagcttctaaaataaattcaagatctctataatttcatatctttgcacaggcagtatctgagcaaagatgaaaacatgatgttcttctttgcacaaagatgatgccacaaatccatcactgaagggctcccgcattgatgaatgttgggttccatgtccttgcagctgatccttctggtcctgttcgggccagctgcatggacatggaacacccaccatggcacagggcctcccactctaaagaacctctgcttggtttaatattctactgtcaccatcttgaaattcttaatttttgaacaaagggcccccaactttcatcttgcactgagccctgagagttgtgccgctaggcctgggtcctaggagtggatgtgtgtcatttgtttgtattcagggcatggccatggcaaaaggaaatcttactgggtgttaatggacccaagatagagcttgcaaatctaatattctcatgttccttcttcacaaagcaactgtgaaacttgttcatgaatttctgctatgaatatctacactctttagaattactatacctttagtacaaaaatgaaaggcaatatgactgcaagaatttctagttatgtatttgcatcctttggtaatttatttgaaatcagtaaatatttcatctttctttaagggttatggcaagccctttgagccaagaagtgtgaaaaacatacactctactcctgtaagtatagatgtaggtgttaccgtgaacaaatttaccttattgttctgcctaaaagctgtgcaaatccctgaaaattggaaatttggaaggaaagaggtgataaaaaaaaatatgcccaacatccaagcaaactgaaggagaagcgaacgtgaagagaggttggaagtagttaaggcacatttatcccgtgactcgagggcataagagcttttcagtccctggcaaatttcttttgctgttgagttgctaagacctcagtcataggctgagttttctgctgtgctttgtcacagacctatagaaattttgagctaagggggtcttagacatcatctagtcaatttttttttctaaatatgttttgcaccagaattcttcttttcaaatgagatcctacaaataactccattgtaaataaaacatctaagtactaattttgtatgcattgacattaatgacatatacctattaccaaaatagccaataaaaataatgattctgatgtaaacagaaggaagttgaatgttgtggatatagtttgcaaaattatgttaacttaacacctaattcattgcctcgcattattataaactggtttttaaagtatcaagaaaattttgatatataccaacaagcagtttcaaatcttaatggtttttgaatagctcagtttacaatgttaggattctctttgattaatgaaacatgggaccaaaagcttcatttgagttgcataaaagctaattaacatggcatcccaaatttacatgttggtgtgggagactaaaaaagatgtaaaccactttctgttatattataaaaataatattcaatattgttattgaaataatttgtaaataatgaaaataaatttcaaatactctagctgaagtatctttgaggagtcgtaggccctggggatagagttaaaccagtggctaagtccacagaagcccagagaggagagatagtgctctctcagccacagtgcagccatacatagtgtggggttaggacctgaagctggcttgaggcaaaatcaccccaagtctacctcgggaaggagccaggctggaaactgacacggcgtcttcctctggtcctggatgagccccatgcttggtcagtgagcatctggtgcaagggtactttgtacatagcccacatcttaagggtcctcctctgagaggcccctggggctaaacagactgagggcacagcatctccagtcaagtgctcccagcactgggaaccaggcagcagggtccctagggctgcttgtagtggtccacaccttgcctctttggcttagtatgtttggttcagcttaccttggtatgatgtggcttcactatgtgtacacacatgtgtatatgtacagtcatgtctggcttaatgatggggatacgttctgagaaatgtgttgttaggtgatttcatcactgtgtaaacttcataaagtgttttacacaaacctaaatggtgtagcctactacacacctagacctcttggtgtagcctgttgcttctaggctacaaacccgtacagcatgtgactgtactgaatactgtaggcaattggaacacaatggtgtttgtgtatctacctacacaggccagggcgccgtggctcacgtctgtaatcccagcactttgggaggccgaggcaggcgtatcacgagatcaggagatagagaccatcctggctaacatggtgaaaccctgtctttactaaaaatacaaaaaattaactggacgtggtggcgggcgcctgtagccccagctacttgggaggctgaggcaggagaatggcatgaacctgggaggcggcgcttgcagtgagccaagatcgcgccactgcactccagcctgggtgacagagcgagactccatctcaaaaaaaaaaaaaaaaaaaagaaaagaaaaaaacacctacacatagaaaaggtacagtaaaaatacagcattacagtcttatgggaccagctttatatatacggcctgtcattgaaatgttatgccgtgcataactgtatgtatgcatgtgtatatagatagatatgtgtattcagttgacccttgaacaataggagtttgaactgtgtgggtgcacttatatgtgggttttcttctgcctctgccacccccgagacagcaagaccaacccttcttctccctcctcctcttcattctactcagagagaagacaatgaagatgaagacctttatgataatccacttctacttaatgaatagtgaatatattttccttaatgacattttctttcttctagcttactttgttataatatagtatataatacatatgacatacaaaatgtgcattaattgactgtttatattattggaaaagcttccagtcaacagtagactgttagttgagttttcggggaatcaaaagttataggcatgttttcaactgtgcagggtcagcacccctaacccccacattgttcaagggtcaactgtatatgtatatgtctatatgtctatatgtatatgtatagaagcatgtacatgtacagaggcatgagtatgcatatatgaacatgtgtatgtttgtctgtatatgtgcatgtgtatatatctgtatgtatgtatgtatgtatgtatgtatgtatgtatgtgtatatatagcctcatggacatacataattgccccaggctttatcatattttacatatgtcttctggaacccaataagtatccctaaacccaggtaagatcagaagtcatctcagccataaaggccaccagtgattaaaaacacaaattgtatgtcactctccaatttaagacttcctgttggcttgccattgcacctgggataaagtctacaaccttatgaccttaaggggatcctccctccagggctgctttgcagaacccagcctaagacagacctatgtctttaatgtcctgtgagaccctctatcacatggcctttgctcacgtatggcttcaacttgctctgagcctccccccacctccctaaccatcccagcaccccacctctttgggctccagccacagaacacgccaagttccctccctgcttagggcctgtgctgtttcttctcattggaattcccttctgttccatggccctacaacttcctcctcctgagaactccctgctctcaactgggtgagatcccctcttaaaccttcccttggtgatcagtcttacatttaccgccactcttgggtgcttgccttgcacctgcgtgagctcgacagtgaggccccaggtgctttgcttgcctccaggccagcctgactcacatgatttagtggtgggatttgtgagcccccagatagccactccttccagtagatgccaagcctgtttcctaccactgtatcctctgcccttagatagcacagagacccagatccacagacatgggccagatgagcaggagactgccagcagcccatcatgggaaacaatgggcaggttcagaggaagagaagccaaaatgagcgaggaggggcagtgtagttgagggggtgcaaggcatgagtgagggtgtcagcaggaacaaccctcctggccgggctcacttgggttccttcctcactgaaagtttgtttcagcccaggcattggaaagtctagccatgagagcttgcagggcctccctctctcccccaacacaaagagaggaaacgtgagcaaactaccctgggcctggctcttcacctccaagagaacggtgctcagtgtgccccatctatgctggggccactgacacacaggggttggggggtaggacaagggctctgctgtggtatgaagctctactggtttgcttgcaggcttacccagatgccacaatgcacagacaactcctggctccggtggaaggaaggatggcagagacattgaatcaggtagggagagctccccttgtgctgtgcactagctatgggttttgcatccccactgtgctccaggcttgatttggggacacttcctcctaaatcactgcattagtcagctaaggctgccataataaaataccatagcctgactggtggcttaaataacagaaatatattgcctcatgtttctgcaggctagaagtccaaggtcagggttccagcatggttgggttctggtgagagctctcttgctagctggcagatggccactttcccgccgtgtcctcacatgggatggagagagagataccaagctccctggtatctcttcttattagggaactaattccatcatgaggactctaccctcatgagctcatctaaacctaattgtctcccaaaggctccgtcttcaaatgccatcacattggggttagggcctgaacatatggatttggagagggaacacaattaagtccatagcaatcactttcatggaaatcctccatccagtgctgctttgcagaacccaactgaagacagaattgacacagcacaggcaagccccaaaactggggattagcccaggagggttttgggaaataattcaaaggtgaggtggaggtgttagacagcagtcttctattcaacattactgctccttgcaaggcagggctaactcataggcagtacactcagagtcagaaatgtatgggctgttggcaactgtatttatacccactaaaacccactttcaattacatgcaaattaagcagcaggttgatgcaaacggaggggctggttatttagaactttctaggacagcagtgataacttctgggtcactgccatggcatttgtaagctgtcctggcactggtgtgagtctcttgcaccagtgagcaatgagggcatccagggttcactttcgtctcatctgctggtttctgctggttttttttttttaacttcatcccatctggaccagatcctgttttggtcagcagggttgtgaccagaaaacaagacctgctggcctcctacctcagaatgaagggtcttttcctgcaaaattgtgaaagatgtagtttgactgcgctgaaggggtctattatgtgagattctgattttgggtacatcctgaaaggtccatcaacacagccactgcgtactcctgggaagattagaaagcagcttgggagctgggcaaacccatgggcaggtttacatggatagggcagagccagtccacatgctcgtgtcatggaggctctgcatgccccctgcttggggaaggaggtaccaagaagctgcccaggccattctgactctaagcagctcctcctgttgcagggcagtgggaactcaggcctatggaatgataagcacaaaggaagacataaatgtagacagtctctgtcaggccagacttatttttttggcaaacacgtgtataatactcactttgttgtagactctgttctgaggacttgaaagatgttaactcttagtctgcacatcagcctattgggggaggtgctgtcatatgcctttttataacatgtggaaacccaggaacaaagaagttgggtaatgtgtccaaggtcacagccacagaaagcagtagatttggggctcaaatacaggcaactgggctccagggtctaggcacttagggggctcattaaaaagcagcaatccccagtaccaactctgtggaccctgctgtagtgggtctggggtgcgcatctgagcctctgacttgaggtcctgggatcctgttttgtgaaacccattggtgagcctggacgtctcctgctgtggttgtcagagtggatgacagacagggctgtgaacactgtggcctgaggaagtgagcccagactgtgtctggatgtagagtcactgtctggggtttccccaatgttgcttcctctggttcctgtcacagtccccaggtgggagctccagctctgtgccccagtgacagccccaaaggtgctgtaggcttggccccttctcactcccactccttagccctgcagaatgggtgctgcctggcacctgcttcaagacaacacagacatcttctccgggcctagaagctttgcctaaaagcaggcaagccaggctcctgcagaagggggctgtgtacccacagactcagggctgcagggcccttccccaggtcctgactgctggtgaggaagatgaaggatgagctgcggggaaatttccatgtgtctctcccgagccgactgtaacctccctgagggccaggctgtgtcattactggtgcatgacacaggggtcactgaagaagcaatgaaagaaccattttcactataacccaatgtggtagatgaatccaaaaatggaggctcagacaagttgctccaatggtaaaggcacgagggacagagccagaaatggggcacagagtggccgactacagacgggcccacctgatcattaagcagggtcagggaagtctcctctctgagccttaatttctcatctacaaaggagagttggggcagctctgctacactctcgggtgaagctctgtgcagaccagatcatgtctctacagaaaacgtagcatgtggtgatcatcacgtagtatccagcttacccattttcacatttgcgcacacacacgtgaacgcatgcacatgcacacataccgctcatgccaagtggactgtgtggacagtatcgcaggtcctgcctggctgagcaggagagggacgtgttccagccgcgggcccccctcctccctctgcggggcagggaggcagctttattcaatggaagctcgaagctctgcttggtggtgtgagaggagggaacaccagattagagggccctgttctttccttgtgagccctctaacttggatggtggtgtatgatgaattattgatctgatgaggcctccaaagttgctgaatcagggtgcagacatccactgctctgctgtcagcctgggggttttgaagttgaatccacccagcacagcccccactgcagattctgttttgctctgcacacaccaggtctgtcgctaattatctattcagcttcactgcaaggacgtgaaccgactcctaacacgtaggccagagcttgtgtatctgctggttttgccgtaaaaactttctttcctccccctgcccccagctcccccatgccatatggtcagacagtgaccacagtccctgagtaagcagacccagtcaatgggccagatgtgcaggtgagcattcccgcgcttctcgtgggcaccaagcctgacatagcagtagactggggcggggagacagcatttcccactaaacaagggcccaggcagggctcctgagaaccagaggaagctggagacagcttgttgcagtcactgggtggggcggggcggggggcatagttaagagcttggaagcccaggggtcccatcagaatggggacacgcatggggtccctggggccccagagctgccctttccaggccctccccacctcccaccttgggcttgagccccaggattctgactgttttcatgccctacatgagctcaccctctcagaattactatcagcagtgacggattagacaggctcccactaaacccattcctgccaaggtctgtagaactggcgctgggttcagatagcaccctctagaggtattagaaggtaaataggctaaagtccctctcccctcccctcccctccactcccctatttattgaatcactcaggccagaaaagtcttcacagagagatgacttgggtcctgaatgctgagctggagtttgctgggttggagattggcagaggagggctgtctaggattctaggcagacaggaatgagcagatatgaagcctaggaaatgtttctggggtttgtgcagagggtggacctaaggcaggagaggttggggagaggaggagatggtgagaagagggctgtttggagggagaaagccatggcaaccccagagcagggtggcttaatgcgcagagcaggcacctctggctcacgtcacacatcagggtgggtgtcgagccggagcctgcccagggtcctcccactctgtggctctgccaccactcagaactggaaatggggctggaggacagagaaagaacagaggctcttggggaggctttcatggccaggtacgtgtccctgacatccctatttcatcagtcacgtagccacatctagcagagaggcaggaaatgtgatcttgccgggtgaccagaagaacaagaaatgagtttagtgaacttgccactctcgccccaatgagtggagatagggacctatcctcaggcattggccatggggctggaggagaggggacagaactagaaataccgccgagcatttgagaggatggggcaggggagagttggtgatgactctaggtttcaaggttgagcagctgggctgtaggggatgtcctgacttaagtcaggctagagtttcatgaactttggtcattctgtcactactgtcacgcttgtgtttaacccactcactatgatgtatttaatgcatttctgtaaatcagctcacatgttaattagcttttggctttacaatcagctagtgtgaaatcatggatttggcgtgcttgttattgtgttttgaaatatacgataaaatggccattcactcaaataaatatgtgttctgataccatcgaaatcatctaatgatgcaggggtcagtgaacttcctataaagggccagatagtaaatcctgtaggatttgaaggccagttcccacagctcagccctgccattgttccgtgaaagcagccacagatgatacacaaataaacggtcttggccgtgctccagtagaacttaatttacaacaacaggtggtgtgctggattatcccctggcttgtagccggctagcccctgtaacagggggtgcgcactgcacttggcgagcattgagggagggacgtgggaggaggagatgtaggttgtgggcaaaaccacagtggtttccaggatgttgagtctgaggtctctgtggatgtccttgtggagctgtctggttggaattctggctctggatgtgactgtagggagtgtcacagagagagatggtgacggggacatcaccattggttagggatggatgaagccatggcctgagcatgaatggggagactggagggcagtggtttgaggagccacatgggtgagaaaggggtggcaggaagtggtggccgccctttcttgcagggaggctgtgaagtatgagcagattgaaggatagacctgagcacatttgtgggtcgggagaaaggagcccacagcaagaggccaggtaaagatgaagagagaggggacagttgtccaaacgagggccggggggtcatggaaggggaggtgtccagggcacaggacagggaagggcgagcctcaaggaatgaatctgcaagagggtgggagcaggtgggaggtcctcctgggggctcctgtcatactcctggggcggccaccactgtgtcacagttccctctcagactgtaaggtgggatgtctcccctcagcatggctgccacttctggaactgtacgaactcctgtgtcagctgaggacacggggcctgagtgctgttactactgcattgatgtgttcctcgaatcaaacctagagaaatgagctgggtatggaagcacatggcatttaccttctctttcccccacttttccccagaaactccatgttgccaatgtgctggaagatgaccccggctacctacctcacgtctacagcgaggaaggggagtgtggaggggccccatccctcagctctctggccagcttggaacaggagttgcaacctgatttgctggactctttgggttcaaaagcgactccgtttgaggaaatatattcagagtcaggtgttccttcctaaaaaaaaaagtctattttggagaattgaaataattcatggaagggaatcactattcagggatttttcccctttgctcttcttttccctccttaaaagaaaaattaccttctagtcctaggatgaggacacactattagtttgaattaaatgctttgatattctcagatcagccatcttgaaccaaagcaaaaccacaagttacactttcttaaaatttgatttgtcatattttctagagaaacttgaatttaattgtgttattcttagcttccactggcagcctagctttgagggtaaatgaaaatataacccatagattacccagccacttgggaacagcaggtaatactgaagaaaaataaaaatagattttgaaaacgttacttacatttctatgattatgattctgcttccatttaagggaaaacttaggtaaatagagaaattttttctataacatttgtagtcagtatttgaagtgattttttaaaaaataagtattggtccctgttcactttttgattagataaatagataaaatatgttatcttgagaaaaatgattatgctgaaagctttataaacagtatactctttaaaaaatgaagagctgacataatttaacttgtatgtattatgtaagtaaaagagttaggagcctttgaatgagtaagttctgattagattttatctttaaacaaaaccacaaaatttaattggtttttacttgtccacttactgctagtgtcagtttcaggggaagaaatggtttcttttaaaaatcttaataggggacatatgccctaaaaatagtcagttttctagtctgagtaatagataagagactgactaagcaaagtttaaaatgctatttggacactttaatgcacatattggatatctaaaagtctacagccatataaaaattttatataattaatgagcaaatgccgtctctcatgccctaaaataaatcagtagaaacatgtttgctggtgaatcagtgaagcattatgttaaacagtgagttacagctcagagttaaaactttctccttctttttgaagaagctgtgcaaatacttctttttaaggagatctggccttttcctacctggttacctcagtcttcctctgctttgggaagctgaaaaagaagaaaaatcacatttaaagcactggaatgtctgaatgggacgcttgaatgtgtagaacagctgtactgatcctagcatgactcagaggacagtctagggcattttctgggtaattcaggataaaagtatttttttttttaagaaaaatacatgtttttggacaacaaaacaaagtaaacattagtttattcgattgcctccttatacttgcctctttcattctgtcccctgtagatttttaaaaaattatctcattttaaaactttattatttcattttaaataattgacatataataattgtacatatttagggggtacatagtcatgtttcaatacatttacagtgatcagatcagggtggttaacgtaatcattggctcaaacatttttcatttctttgtattggtacggagcattcaatatccatcccccttctagctatctaaaactatgtattattgttaactataggcaacatatagtggtatagagtgctagaacgtattcctcctaggaataatttgctgtaattttgtatcctttaataaatctctccctatccctctttccccccacccttcccagctgctgtgtcctctgttctaccttctacttccgagataaacttggttttagcttccacatatgtgtgaggacatgtgattttcaactttctgcagctggcttatttctcttaacataatgtcctccagcttcatccatgttgccataaatgacagaatttttttattttagtggctgaataatatttcattgtgtatatataccatgctttcttcatgcattcatctgcctttggacagctaggttgattccacatcttggctattgtgaatagtggtgtaataaacatgaggtgcagatgtctcttcaaaatacagatttcctttcctctggacaaatgcccagtagtaggatttttgaattatattgtagttctatttgtagagtttttgaggaacctccatactcttctccaaagtgcctgtactaatttacattcctaccaacagcgtatgggttccctttactcagcaacctcaccagcatttgctttcttttctttatttaatttaattaaaaattttgtttgagacaaagtctcactttattgcccaggctggagtgcagtagtgcaatctcagctcactgcaacctctccacttcctgggttgaagcaattctcctgtctcagcctcccaagtagctgggacttcaggcacgagccaccacgcccagttaattttttgtatttttagtagagatggggttttgccatgttggccaggctggtctctatctactgacctcaggtgatccgcccacctcagcctaccaaagtgctgggattaaaggtgtgagccactgcatctggcccagcattggctatttttgactctttgatagtagctatcctaactgggatgagataatacctcattgtgggtttgatgtgccttttcctgaccattcatgatgttaagcagtttttcatatattttttggccattttatgtcttttgagaaacatctgttcagatcatttacccattttaaaattggattctttttattttgctgttgagatatttgagctcctcgtgtattccagataataaccccttattggataaatagtttgcagatatttcctcccattttgtacgttaacttttcactctgtagtttcctttgctgtgcagaaacttttttcgtttgatataatcctatttgattatttttgcttttgttgtctatgctttcgaggtcttactcataagtttttttacaagaccaatttcctgaagcattttccctagattttcttccaatagtcttatagttttgggtctcacatttaggtctttgatccactttgagttgatttctgtatagggtgagagaggggagtctagtttcattcttctgcatatagatacctactttccccagcaccatttgttggaaagactatcttttcctcaatgaatgttcgtagtctttttgtcaaaaatcagttggctaaagatatgtgtattaattgcttgagtctgtattctgtttcatttattgatgtgtctgtttttatagtaccatgctgtttcagttattatagttttgtagtatattttgaagtctgatagtgtgatccttgtaactttgtcttttgtgctcagaattgttttggctcttcaggaccttctgtggttccacacaaattttaagatttttttttctatttctgtgaagaatgtcattggtgttttgatagggattgcattgaatctgtagattgctttgcatagtgtgataattttacaacattaattcttctgatccatgggcatgaaatgtctttacatttgtttatatcctctgatttttcatcagtattttgtaatctttttttgtagagggttttcacttccatggttaaacttattctttgatattttagttttttgtagttattgtaaaagggattgctgtcttgatttttcagctagtttgttgttcatgtatagaaatgctactgatttatgtatgttgatttttgtctccagcaactttgctgaatttatttatcagttctaagagtttttggtagcatctttaggtttttctatatatgagattatgtcatctgcaaacagggacaatttgacttcctcctttctaatttgaattccctttttttcttcctcttgtcttattgctctggctaggacattcagtattatgttgaatacaagaagagagagtgggcacccttgtcttgttccagtccttaggggaatagtttccaacttttcctcatttagtatgatgttagctgtgggtgtgtcatatatagccttaatttgttgaggcactttccttttatacctaattttttggtataaaagatttctcatgaaaggatactgaattttatcagaggctttttctgcatccgttgagataatcatatggtttttgtccttcattttgttgatgtgatgtatcatgtgtactgatttgggtatatgaaagccttgcattcctgggataaattccacttgaccatgatcttttatctttttaatatatttttggatttggtttgctaatatttttgttgagggttttaacatctatgttcattggtgatattggcctgtagttttctttttctgtgtgtctttgtatggctttggaatgagagttatgctggcctcatagagtaagaaaggaagagctatctctacttgttttgtggaattgtctgagaaaagttggtattaatacttctttaaagtttggcagaattcagtagtgaaaccatccggccctgaactttcttttcttgagataatttttattattgattcaatcttattacttgttattggtcaattgaggttttctatttctttttggatcaatcttagtaggttgtatgtgttcaggaatttatccattgcctctaggttttcaaatttaccggcatatagttgttcacagtaattaataattctttgtatttctgtggtctctattgtgacatctcaattttttgtttcaattttatttacttgaatcttttctcttgttttcttagtctagctaatggtttgttgatttcatttattttttcaaaaaatcaactttttgtttcattaaccttttgtattgtttttctggtctcgattttgtttatttgtgctctgatctttattatttctttccttctactaattttgggtttcatttcttcttgaatttctagttccttaagatacattattaaattgctcatttgaaatatttctagttgtttaatgtagtcatttgttactttaaacttgcctcttactactgtttttgctatgttccatagattttggtgtgctgtgtttcctacttttatttgcctcaaggaattttaaaatctcattcttaattgattttctcactccttggtcatcaggagcatgtagcttaatttccatgtatttgtatagttttgagtgttcatcttgttcttgatttttagttttattctcttgtggtcagataagatactttatataattttgatttttaaaaactttttgaagcttgttttgtatcctaacatatggcctctcctggagaaagttacatgtgctgatgaaaaaaatgtgtattccgtagctgttgagtgaaatgttctgtaaagtctactaggtctatttggtaggttcagtttaaatctgatgtttccttgttgattttatatctaaataatctgtccagtgctgagagtgagatgttgaagtccccaactattattgtattggggcttatttctgcctttagatctaataatatttgctttatagatctagtggttcagtgttgggtgcatgtttatttataattggtatattctcttgctgacctgttccccttattattatttaatgtttttcttgtctctttttacagcatttgactttaaagtctgctttgtctgatataagtatagctactccagctcacttttagtttctgtctgtgtggaatatcttttccaccccttcatgttcagtctatgtgtgtctttacaggtgatgtgagtttcttgaaggcagcatatagttgggttattttaaaattcatccagccagtctttatcttttaaatgaggaatataatctgattcaaggttattatggataagtgagggcttactcctgtcattttattgatttattgattgccatgttgttattttgtatatcctctgtttcttacttcctctcttactgcctttttttttttttttttttttttgcagttgggtggtttcctgtagtgatgagcttttattactttttttcccctttgtttttggcttttccagtgagttttgtagttttgcatgttttcatgattgtggttattttcttttcacttctagatgtaaaactcccctgagcatttcttgtaagatcagaatagttgtgatgaattctcttaacttttgcttgtctgtgaaagattttactttttcatttctgaaggatagctttgcttggtataatattatagtctggcaagttttgttttgtttacagtacttcgaatatatcatccaattctctcctggcttgtaaggtttctgctgagaaatccgcagtctaatggggattccattatatgtgacttgatgcttttcctttgctgtttttaaaattattcctttgcctttaacttttgacaatttgactataatgtgacttggagagaatctatttggagtgaatctatttggagttctttgagcttcctggatctgagtgcctatctgttcaacaggaattgggatgtttccaggtattattccataaaatatatttcatacaccttttccattctcttctccttctggaacactcataatgtgaatatttgtcacttaatggtgtcccataaatcctgtagtctttcttcattctttttttgtctgcctgttatttcaaaagacttgtcttcaagttcagaaatttattattctgcttggtcttgtccattgttgaaactctcaattatattgtttaatttcattcactgaattcttccattccagaatttccacttgatcctttttaattatatctacctttttgttgaatttcatgtacatatcagaaattgctccttgattttgttgaattgtctatttgtattctcttatatctcactgaatttccttaagattattattttgaattcttttactggaattttgtgtgtttccttataactggggtctgttactagagaattattatgttcctttggaggtgtcatgtttccttgcctgttttgtgtttaatgtgtccctgcattgatttatacatatctggtgaaacagtcacctcttctaattttatggagtaggtttcatatggaaaaacttattcatatagatgggttttggggtgttggtttgatggggtgcattggctttgattctaagtggacacagtagtgtagtctctatgtagtgtcttcaactataatccatgctagtgatgtttgtctcagtggcctgggctgagagagtttatggcagtggtggtgcagctttgctagaggtgggctcattggtttgtttcttaggtcaggggcatatgtgtgcacacagtgggtgagccaacttgtggtctggctttctggagttgggaccgtgggattattactctggctgggggcacagacacacaattgcttggctgacctgggatcatgcctgccaggggcatcatatggggctatttctcaggcctgggacagggacacaaggcctcttggccagcctggaaggtatcttcctgcagcagcccacagggctatttttctggcctgagatgggggcacatggtttctcggctggcctggggatgtatcagctgcttagtgcctcagggacctctcccacttggggtagggcatgcagtggtttggctggcttaagagtgggttcaccctgggcaggactgcaaggccgtttgtcccactggaaatgtgggcggtgaagggtgggtttcttttttgggctcatcctgagtcacagctaactctgggcctggaatctacacagctggggttgtgacattcagacactcatgtgggcttggtggaatgaatatggagcgctggtgctgtagaggtacagttgcgactgatctccagagcataacacactccagagtgtggctctggtctcagaatggtgctgtcctgcagtagcttggctcacagtgggtgggtatgtgtgggtgagagcttggctcacaatgtggggggtaagcaccttgtgctactaatctggaacaatgcagttcagtgaaatccttgcagctctccaaactgggctcagggctttgtgaggactgtgggagtcttgtatgtaaggactgtaggtgtttgcagtggcaatagggactgttagtgatcttctgcttacctttttcctgcaatggaaagtccctcctgtctctgggctgatcagatccaggcaggggagatggggtgcagatgcacggtgcctctacactgccctcctgggcttctagccgtcacaggtacttctccattcctctgctgcatgacagcattctcttttcaacactccagttaaagcttagttatttatttgttgccatgattctttcttcgtgggggtctgggagagcaccagacatctctagtcagccatcttgctgatgtcactcccagaaacatatacttctgagtctgaattgttggtaagggcaataggtggttattagaccttctagatttgccttactaccatgagtcaaatatagcacactgtctgttcttataaataaagctttgttggcacacaaccatgctcatttgtttaggtattatctatggctccctttgtgttccagcagcagagctgagtaattgcaacagagaccccacagcccacaaagccttcatatttactttctggctcttcatagaaaaagtgtgcttgactccttctctggggaattctatttggaacctctacatcatatcagacatcttaagatgtattcataccttacattaaaaatgaacacattgccatacaaattttgaaaggttttaaataaatttgcttttgactatgggtaacttatttagcttactactggctacaaaatgtcagcagttttgcttatttgtgaattcctgcattatgagatgctctctgacaaattgttttcaatagtaataaaatattcatgcaatactcatgaacaacaaatttaacaattaatgaggtaacaaaatatcatgttttatagatatttagttagacatttatgaatttttagtttgctgtcttctttgtgtattttgaagccgatatccttatctgtacacacacacacacacacacacacacacacacacacacacacacacacatatatatatatatatatatcctgactattttcataggcctttcggtcttggaattatagtgtccagtgaagaaaatggtcatgttggcatctttatgaagtacccctggcataggatatttcagcctttccctttacatgcaagtctatattatatattatcaccttccccaactgatgtctgcaggagacattcctggatgtctgctggtcctcctcccaagttcattctcaagtctacctacatgcttaaagaaagcatccattagaaatatcagcaccaggaggttttggtgaaaattcctagcttgtaatggaattcacatatactcatgaattaaactaattcttgctaacggcaatgaataaggcaataaacagaaatagtaaatattttcagagaaaatgtgattttattatgaacattagcctccaaattacccagcagtccaaagatagcggcagtctgagaagttaaatatttattttgcatttcatcaattttggtttttatgtgcaataacaatctgattggttttgtggagcttttcatctaagatgttcattgtgcttacttttatgatttactaaacacagcagatacctcagttgttaaaactttccttttcccaagtgaaacactgaccgaggagacctcattgtatgtttctgtgaagtaggcatagcaacggtcccctcaaagatgacctgtggcagccgtcaaggatatcaagacagtgccaaatagagggcgtttctaagatggtttcctctcatcagagagtttttctgtgtggcagagactgcaacccttgtctagtcattgtcttctctgaaatttgtgtgtcaaaggccaaacaaatctgctatgaagaaggagaaggataaagaattctggagccatgaaaacagtcctttcactgttcccaacacaagcattctactgctgaaattttgtgcaagtatgaggctgcagagactgctgattgccctaaaacatgttacctcttcttccccagtaaaagaaccctgattcttgctgtgcacttgccaggcagaatggcagcaacatttcccatcctccacttcagctaggcatggctatgtgactaaattctggccaatgggaggcaacttccaggaagtgtccttgaagagggtggagatgtgtctgtttccctcttcttctactggctggaattagaatgtgatggctggaggtggggcagccattctggtcactgccgtcagagctgatacacagtgtagtgcaggatagaagaggcagaggtgcctgtgcaccagggagccctactccactcctgaaccaccttcctctagactcaaagtgaggaagaattaaatgtgtcttgtttaagccattgctcttttggattttctgtcattcatggccaggtctaatcttaactgatacaaaatagagaccaagagaagtgagctacaagtagcagaaccgaagcacgtggccttggcttaatggatgtgttcaggcggcaggggctcaaatattgtgagctagagagccagtgacccttgttatacagaaacaaagcatttgataaaaaccactgcccattgttttttgaaaagcagcccatgtcctgaataaggactgaggcaggaaatggcaggagaaatttataatgttaaaaaaaaaaaagcattagctgcttatcactgcttttagcaatgttctacaagagagagctggactttggctactgctggccagtacctgagcaagaatgaaaggaaacacagtgtgctaatggaggcactctacctgcagtctgcaatttaagttgactgagagcttggtaatttggagccttgcagggttgaaaaaacaactgctgtgtttcacaaactatatcagtcgtagaaatggtttctgcaaagcagcctgcttagcagaaaataaaactagtgccccatcctgccaatttggaaccttgtgtcaaaagtcatttgaagggttttgtcttcccagctaagcccttccttcccatggctccaggtgggtaccattatgctgacagagggagagagagagagagagagagagagagagaaatatcagcagagcatggaggcccataaggaaaaaccagaagtttcagcattaaaaacgtgtcttcacagaagagctcaccggaaacaagtagatctgaagtctttatgtttttgaaaaactgttttaccaaagaaaccagcagtttggtctgtctgcaaaagcttgtgattgtttaaccccaaagtgattcctctggggggttggaacaaccaaccttcaaagcaagaagcaaactgtgaacgctgtgtagcctcaggaagggcataccctttgccccccacactgggtacagcaggggagataatagtagggaagagcctctgagaacacaaggccatggccatggcgggtgatgctacagaaggagactccactcttcctgcccactgggatttgctcacgtgtgtagatgatgatggctgtgtttatcagcctccaactaccaagtgatagttttagtcacagctcttctgttcttactcatctcccttatgttggatgtattgagagcaagtaacttattacttagtttgtagtttgtcaaaccattaaaatcctcattcatatctcagagaaaggactgtgctttaccctgggttgccagatctagagtcagatgcagtgattggatggaattttgcagatgtatctcttgggggcaagagatgagcatgttctgtgtatgggaagaaaggctcacacaggtctgtgggtggccaaaggagtggactgtagcagaaactactatctccccacccactcccatgatctcttctttccttattcttaagaaataaaaccctgaatttagccagggctatggctttcccaaatgtacaatgcatttctcagacttccttgacctagctgtgaccaggtgactaagttctggccaatgggattcatgtagtggcagcagaggtggtcgtgcaagttctgaagggtcctgcagagagcaggtgcgccctcctctgcctctcctccctctccctgcaggctggctgccgacctgaagggggactatctgcagagcttgggaagggaggcatccacagtggaatcctgtgttggaaggagccagagtccctcacactggcaggccaaaaaggcctggatccccaaacttttacaaaagagaaataaatgtaagtcagcagttgtgggggcactgtgttctgtcattcatcgtcgaacttaatactaagtagccccagtaatgtggcctaaaaaacaaaccaataaatagaaaaccactgatgcataaacgtgtgctatgctttagagtgattgcctcgatgagttaaatgcattcagtgaacagatttttcccattatgtttaaacaagtatatgtacaatgagtgagtttcctccttacaccgtgctacactattgcttaacagattcctaaaattctcttccaaaatgcctgtcactgccccatggcatatccttttaaatatccctttccactgacctcacaatgtcacagtgtccttttgagcttggatttgatttttggaaactgccagaagtcctccagggccttcggggtaagcaggtgggtgatcagcctcagcgacacccttctgggctgggagcaggtgtggtgaagggcagatgaactcgttacctgagtcacaaggccattcattcccacatgggcctgtagagggtttgagcccttgggcatacctgttttaaatgtttttaaaaacttcctctctcagcccaactgagaggagtattaagcagtggggtaagtgtgtacctagatcgccaaccctgggctggcactgccagtttccccagcacctagactgccaagcactgactccagctaacactgtcctttatcaaaacacccttaaaccaagagtctgaaaatacaataaaggtgattaggagctgcttgcccctgatcaaaatgaacccggcgtagtgttgaatgctttcaatctaccgaaatggaccttatgtgctggacactatttcatttatgtggaatctgtggtgttagctttctcagagcccagagccaggcaccaggcctcactgggatgcatggcccgaaaaaggcttcattctgacttagaatctagtaggaggtgaagtcccacaaagtgactgttgccttaacccgctctgggaagtctgtgtttgctctggggtttatcgtttgtttccctatggggagcagaatggtgaagacatcctcccaagattcctgaggcctttcaactcatactctaatctggcattactgtgaaggaatttgcagaggggattaaggtgaataaccagctgattgtaaaatagggcattgatcttgcatcttgtgtgtgggcccagtgcaattctatgagcccacgagagtggagacagctctctggctggagttagagagagagagagagagagagagagagagagagagggagaagaggaggcagaagggaggtgaggcagaagggacttcacagagaccggaagcaagaaaagcactcaccctgccattagtggctttgaagggggccacaagccaaggaatgtggatggcctccaggatctgagcatcccctcaccccactggtgattgccagcaaggacacaagaacctcagtcccacaaacaaggacctgcatttggtcaagaacctgagagcgcttgggcatgcattctcccccagagcctgtaggaaggagtgcagcctggctgatgccttgactttggctctgtgaaactcagggcagagaacaagctgaactgcactgtgcccacacttctgacctacagaccctgtagggtaaatttatgctgcttttaagcagggaattttctggtaatctgtatgacatcaaaccttagcatgaatgtaaacttccacagggaagctttgtcaaggcatctccagtgcctggaacagtgtctggaacagcataagtgctcattaagtgctcactgagtgaatgagtgatatggcgactattggtatgcggctcctgcaagaaggctggagaagacacgaggggccacagcagcaaatggagccaggacagcgtgtatgtgtgtgtgttgaggggcatgcggagggtaggggcagtaggtggtcacttagctctctggggacagggttatggtcttgggcagaggagaagtagtgctgatgtgatcacaagactctgattctgtcccctcagccagtaggggcctcaaggtcactgcttgtatatggctcaggtgaaaaagaaggacagtggtgggagggtgatggtcatagggtcacatttgaatctctgttgtttttttccctcgatatagaaaagttgaaagaattgtacaatgaagtcatgcatacctatcatctagattctgtagttaacatttgctatatttgctttaacacacatcaatgcatctttccatccctcttttttcttttcttcctcttcctcctcctcttcctctatatcctctttcttcttctttcatcctattcttcgatgtgtttcaaagtaagttgcagacatcagtatactttacccctaaatactttgcctaggtagtgttgagtttgatacttttaaaggtaaaatttacaaatgaaatgcataggtcttaacttcaccattccatgagttttgacgaacgcactcaactgtgtaacccacatcccagagaggtatagactattgctggccgacagcaggatctgcagtgatgaaaatggtcggtgctgcccagcacagcagccaccatgggtggtccctgagtactggaaatgtgtctaccaagatggaagacctgaatttttgattttatttaattttaaataatttaagtttatattctatgtgggtgacctgctaccttttaaaattgaaattttggttggaataatgatagattcacatgcatttgtaacagataatacaaagaggtctcatacccttcactcggttttctctcagggtaacatctgaccagacaactggacagtatcacaaccaggacactgatattgaaatgctccacctaccttactcatgcttcttggtttcacctgtgctcttctgtgtatgcattaagttctgcactgttttgccacctgggtaggtctgtgtaatcatcaccactgactgatgctgaacaaggtgctgagcagggcagcacccccaggacctccaggctgctccagtataaccacacctgttctcctcttcccactcactcttgcaaccactggtgaccatcagctttaaacatttttaaaatgttttcacttatgtaatgtgatataaatgggattatacagtatgtaatcctttgagattgggttcttttgatctgccacgtttttaaaagcctgtcttccccactgggactgcaggctccttgagggaaggaactggttgtggctgaatccccagggcctgacatgtagtaggcactctatgtttattgatttagcgagaggcaatccaaataaaaaagcatttacgtgccagtccctgtgatgcagagggggcagtggagggagagaaaagcttgcagaaggagatgattcaaaacgctgagcagggagttcataggcaggagacattcagagggacacagcatgggcaacagctgggaggcagggctgatcaggaggctgcagcctggcctgtgaggatagcgtgtcttaggctgacatggcaagtgaggttgtggagacatctgaaccctggtacactgctgattggaatgtaaaatggtactgctgctgtgacaaataatatggatattccttaaagaattaaaaatggaactacagtaggattcagcaatcccatttctgaggatatattcaaagaatagaaatccggatctcaaacaggtatctgcactctcacgttcgctgcagcgttattcacggtccccatggtgtggaaaaaacctcaatgtccacagataaatgaacaagtaaagagacgcgatatagacacacaaggggatgctattcagccttccaaaaagaggaaatcctactatttgcaacaacatggataggtctggaagacattctattaagtgaaataagggggacacagagggatgaggattggaaggtttcaccgatgtgagtgatcaaaaagagtcagatgaaaatgcagaagatagaatggtagtttccaggagatggggtgggggagatggggatctgtttgtcaacgggtataaagttacagttacatgagaggaatcagtcctagaggtctgctgcacaacgtggcacctatagtcaacaacgtagcacctatagtcaacaacgtagcatctatagtcaacaacatagcacctatagtcaacaatgtagcacctatagtcaacaacgtagcatctatagtcaacaacgtagcacctatagtcaacaacgtagcacctatagtcaacaacatagcacctatagtcaacaacatagcacctatagtcaacaacgtagcatctatagtcaacaatgcacttcaacattttactttaagtgctaggatacatgtgcagaaggtgcaggtttgttacataggtatacatatgccatggtggtttgctgtacctatcaacccgtcatctaggttttaagccctgcatgcattaggtatttgtcctaatgccctccttccccttgcctcccaccccccaacaggccccagtgtgtgatgttcccctccctgcgtccatgtgttctcattgctcgactcccagttatgagtgagaacatgtggtgtttggttttctgttcctgcattagtttgctgagaatgatggcttccagcttcatccacatccccgcaaaggacatgaactcattcttttttatggctgcatagtattccacggtgtatatgtgcacatttaaacatttcttaagagggtaggtctcatgtcaagtgtccttaccaccaaaaataaataaatgaataaatgaataaataaataaataatatataaaagcaaaggaacacatggtcactgagagacaagagattcagtcttcactgaggttgaaaaacaaggaagggagaaagaaagtgaactggggatcccttctgccaccttcccccacaacccctggttttattgaggtataactgatatgttaatataaaaaaagacatatattgaatatctacaatctgatatgatagtataccatcaccagaatcaagttttgtggagctctgctacctttttgctgggtgacttccccagtctgggcctgtgtctatttgaaaaattgaggattcattttgactggagggttttccacctgagttctccagagcctcagcattccaggacatcagggtgatttgaagtcaatcacagcagagaaactttggtctgttggtgttttaagtatctgggtttttttttgtttgcttttttttgttttgttttgtttttgtttttttcagtatcccttcaccttcttctaggaaaacatctggacttcctttgggtagttccccatctcttcatcctctgtttctgtaagttccagaggcagatcctggaagattttaactagctaatgtagcccaccccgttggccaccactattagttcagagatgtgcattttacccaaactgagccagtgagagtggggcccagggtctttccaactctttggatggactttgaagctgagaggctgtaagtgcaggggcagttgcagcaaccttgagaacatgaggggaagaggcagagtggttgggggccaccagatgtgggaagcatggaagtgagctgagagggagtggagtgggttctaatgacattgcttaagtcctgcacctagttaagaagccatgactccccttggacaattacctgcaccagtgaattcacttttgtgcttgattcaagtttttggaaaccagcccggagtgaaaacatttccttcaaaagtttttgtttttcaaagtgaaagcaagtttattaagaaggtaaaggaataaaagaatggctactccatagacaaagcagcctcgagggctgctggttgcacatttttatggttatttcttgatgatatgctaaacaaggggtgggttattcatgcttcccctttttaggccatgtaggataacttcctgatgttgccatggcatttgtaaactgtcatggtgctggcgggaatgtagcagtggggatgaactggaagtccagctttccaggagaaccttctaatgagcacctcttacctgctttgtgtagtctaaagagagaaatcgcttcagcctcagcaggggctgcatcatcccccagggaagagccacagctgggcgaggattgccacaagacatttacaaggagatgatgccacggagactaacgcagactggtaaacggaaacacggggctttggctcgaacaccctctttcaagaaagttgtttatgaccacaaggaaggtttgagtctctatatttttgcatgtactagatttctccttttaaaaaagattcagttatgaattcaggcgttcaagttaatccttgagaattaaatcaattgaattaattatttgtaaaaacatcctcagtttcttcagatgaaaggagtatgatcttcacagaattctgcttgtaattcccagagcagttgatgtattttgttgtattttgctgattggctttgtgtgatgtgcaaagttctttacagagaggctgggagagagttggggggccaaaggtgagagggctgtgttcttcccacgctggctcacagcctcttgggagtttatcatggagctgggtggcggccactgtcttcactttcccagtttctggttttgttttttaaagttttcatcctcccactttggaagcctatggacttcatctgtcatgcgatttgtaaatcaagaccccaacaggcagctgtctgcttctattagctttcatgacacaggtgacactgcatggaaggcctgcctctttctttaagtcagttattaatatgaaatgacaccaagttgtttctcaaaagccaaacagcctaagaatagtaaagaaaaatcataatctcacagtattataattcaataactatcattattaaaatggtggcataaagcccaagctttgcaatgtgtgggggaagttgagtgagaaattcaccctgaaattcatctgtgtatcagtcggagaaattaatgctggcagctgaaacaggtaaatccaccaaggcttttaacccaatgaaggtttatttatcatcaggcaaagtccagtaagtgcacaatttgggcctgtaggttggctgtggcaggggaaaagatgaagaaagcacagtggctattaaattctattggccagaactagtcctgtgaccatgatctatttgccagggagacgaggaggtgagaatgaacacatagatactgaatgcatgtggttcctctagcaatgtaaggcggatttctactgttgttagtcagaaatgaaactcaaaactcatttagatgatggaattacgaagaacttgaatgtgggcctaacataaatcatgctgctataaagacacatgcacacgtatgtttattgcggcattattcacaatagcaaagacttggaaccaacccaaatatccaacaatgatagactggattaagaaaatgtggcacatatacaccatggaatactattcagccataaaaaagggtgagttcatgtcctttgtagggacatggatgaaattggaaatcatcattctcagtaaactatcgcaagaacaaaaaaccaaacaccgcatgttctcactcataggtgggaattgaacaatgagaacacatggacacaggaaggggaatatcacactctggggactgtggtggggtggggggaggggggagggatagcattgggagatgtacctaatgctagatgacgagttagtgggtgcagcgcaccagcatggcacatgtatacatatgtaactaacctgcacaatgtgcacatgtaccctaaaacttaaagtataataataaaaaaaaaagaatcacatttccaatcctggtgtctcatagaggatcaaaaaacagtgtatgaaagacgcatgatgtgggcatttagagcattggctttggtttgggaggaagccagggcttaacaccagctctattattcaccttgtgtgagcttgattaagtgtattcaacactttgagtccttattgctttgtcggtaaaatggggaaaatagtaacacccctcttacaggttttttgagaagtcattgctattactcttaccaccatcactgccccgggaacttgtctttgtaataagatttttggtggatctgaagctgtgggttattgtttaacctccttcgtgtacacaggctgccttccttcatgcatacatgcacgtggcaaatacttatcaaatgcttagtgaatgctaagcctgtgttaccattttgcctacgttatttaattctcactttctgttttcaccccattttgcagatgaggagaacaaggctgggagaaagcaaaggagccacttgtttaaggttatgcagctgagaaatgaacaaggtggggttcgagtccagagtgcgcattccccatcaccccttaacaaaaaggcatgtttcccaggagactacagaggagaatcggcaggtggtcacaattgcagggctgtctcaggctgagcagagagtacggtggaggggcatgggcctgctgttggcggtgagggccttggaaatggcttcctggaggagatggcaattatccaggtagacaagatgtgtgtgtgtgtgtgtgtgtgtgtgtgtgtgtgtgtgtgatcatgaagaagaaataatgtgcaaagccctggtcataaataacttttcctctgcaaactgtggatggcagttcaccatgtttctcaccactggcctggtcactgcttatccaatatgcatgtaagaattactttttctcttttttcccttctataaattctcatagaacttcctttaatgcattaaaaaagcaactagcatgttcaacccatgatatcatatatcctatgttttaggatgcaactaaagtgaatatataggtgaagagggtgaatcagtgcagccggcagcacagggaaaaccaggaactgtcaatatagcaaaggtgggaagcccagggagctgaagcttcaggaaccctgggacagagagtgtctccctgcattccagcttagaagtgctgctcttcaagacagagtgtcaccagctccatttgtccataaagccacattgttcgaagggaaggcaatgtccctctgccactgctcaccatgaaaagacagtgctgtgtcaggaactgtggggccagagctttgtgctctgggggaagggtcatgaggcaaaaggtcacaagagtagccaggaaagttctaaattagccttgggaacaagccaggcccagagcagagacccagagttcaggaatgttccctggccctgcccttgaagtctctgctcatagcctcggagccgtggctaccagggagggtggctaaaaataccttggtcaggggcctagagattgcacttaggagactgctttccagaggcagcccggggagagccgacagcagtgtgggcgccagggcccccaccagctacaaaggtcagccagcccccagctgccttcaggtgggtgtttctgccagttctcctttagtgttcaggctcaaatgaaaggccactttcagcaagttttcctgacattgtcggagactggagccaaggccctgtctgttttactttctgaaagagccagtctgagagatggatgggttggcgactgaacaccacaaacaacagcagtgggctttaacctgatggtggaggctccggcacaggtggggaaggccagtggctcagaaggcctgacaaggacaggaccaaagctccaacagctcagagctggactccttcccatcccagatctgagctctttggttctccttcacagaggtgattatggttcatagtatcttctaaatagaaatgcatatcatttaaaatttttaataccaatgtgtaaactgaaccacactttaatttattcacctaacaatccacctaagagatcctgccctgtcaacataggtatagttattgcactttttagagtttttatgtcattgtttgtacgactgtgttataacttaagcagttttctgctgagaatattcaggctatttctggctttttgctacaacaaacagtcctgctgagaacattctaattcacactttttctatgcatgcatgaacatattgttaggatacagtcctagcagtgaaattcctagaggaatgggaacatacgtttacaatgttaatacctattgacaaattgttttccaacattcccaccagcagtgtgtattatcagtttttaaatatttaccagcctaagtaaaataacttaaaaagggtctgtaattttagtcttaacctccataactttcattataaatgaagctggaacatatgaaattatgtttatgagccacttattttcctgtgaactgcctgtttttgtcatttacccatttttttttttctgataggttggtggtcctttttatttatttgtaggaatgctttgtatgtggtatggtttggctgtgtgccctcattcaaatctcatctcgaattgtgatcccacatgttgagggagggaggtgattggatcacggggggcggttcccccatgctgttcttatgataatgagtgagttctcacgagacctggtggttttatttggggctcttccccactttactttctcttctctctctcctgccaccttgtgaagaagagcatgtttgcttcccctttcgccatgattgtaagtttcccgaggcctccccagccctacagactgtgaatcaattaaacctcttttgtttataaattacccagtctcagggaagttcttgaaagcagtgtgaaaacaggctaatacagtatatgaggatattagctctgtttgttatctatgttacctttttttcagtttgtcctttggtttttgatatctttttccatgcaaaaactaaaaaaaaaaaaaaaaaaaaaaaaaaaagatgaagtcaaatgtatcactcttctttatggctttaagaggacactgatttctgaatggtgagaaaaggaggtgacaagaaacttctgcaccttcctgcaccaaaccagacttgaccctggaacacagcaatctgacctggctgcgtgtttcatgtgtggtgggttgatggcccatctctcatcctggtcactgtcacctctgtttcctacctgcttagcctttaagctgcgaagtcatcctggacatgcatcacctccccaaactctgtcttgtccccattgccacccttcccccagcctctggacaaatctccctgcttcagtgtctctcatctgttgggtacaaacatccccagaagatcccccgccacacattccctggatcagaacccatcagtggttccctagtgcctgggaatttccattcaatggcctccgaaccatgagcctgccttttctgcctgaagcccaaaaccccagctacagatctttaccccagagaccatcttgggcctccctccaggcttttgcttactctgtgccctcatcctggagtcctgtccccacccctatctacagaaactccaccagccctcctggctgccccgatggtcctcgcacagggagacttgtctacctcccgaggtcacgtgtgggctctggtcctcttgccatcatggcagagattttgctgtatctccccctggctgctggtgctctgcttacctcctccagagttgttaacaaagagctgaggatgctgagctgcccagggacttggctgcaggtggcatagggagcagcaagggctggccagcccatgagctacacgcccgagtcagctgcctcctctgggtaatgaagtggaaacgttgctctccacctgccacctccaggggctttcttgctctctcaagtgattctaaccactggtcattcttagttaccaaccacagctccaacactgggcaccagggatgctgaagggagcaaaaacaatgagcctcccaagaggtgagatggaaattaatctaataactacacagaaaaaaatgcaatcataactacattcagtgccacacaaaaggtttgtgaatcaggagagtgtatctccaggggtctgacgtagtctgggggttggggaagccccacaaatgcccgagctgcctgtgagtatgaacagcgaactggagggggcagtgtcccagtggagggacagcaggagggagcctggtgcacccgtgactcacacggctggggagagggctgaggaagctccagcattcctgcttcccctgatcttgcccttcagagggtttgaggctgaaccagtccctctttgagggaagaaagggaagatgtgtcccctgcctgacaattgacaaacagagcacattcctttcttggttccaatgtcatttgcttgagaacaaatggaccaaggagaggtggcagagcagggatcctccagcagtgagttgtgctggccctggctggtgtttcaggatagggtcctggtgaaaggtgacagaggtacagccattgaaccacaggctcctctcccgatggtgatcctcaaaagggaggctgctcccaggtggggtgccagctgcaagggagcctgagagcataggcgaacactggaaacagaacatctggggattcttctgtgccttgactttctgtattcttaatatctcgatggcagagaaatctgagatcaaggctaaatatttgcctctgcttcggattttgattccactagaaagacagttgaaataatgtacatttcagcttccgatgaaatagccagcaatggaggatctgtgtttgtttgcgaagtttactcacccaataaatcattcctttgcagagatgccattaactaataattcaaggttggtaacctccaatcaacagtgattaaagaactttcgctgaatggcagagagagaacacgtttttctgaacgctagcagcagtcggcttgcaccatccatcttttctttgataaactgctctggactaataattccagatggaaagattttaaatcaagtacggaggttggcaggatcagggaaaactctgaataattgtaaagactattttattgcagactcttttcagatgggagacagtcacctaggttctcaagagtggatggtgtttccaggaggggtatttcctcctcacctcttattcatactctgtgggcactccacgcccatcgcatgagagtttaactgtgaagtgtggatttcacatgttgcattcctgtcatcattgcccccaggacggaaggccagattctgcacttgacaccctcaagcctatctcttccacactctgcctggaattttgtgtcccaatcatactgaggttttcctggctctttccttctcagccttcaggtgccagcagggatggtcactgggccagatttctcctctgatccctgcagtgcctcacagaaccactggaaaacacactgcctcctggcttgtctgcccctcctctaggctgtaggcgagctcactgggggccagtgatgtgtcttatcttcttctgtagcctccatactcaacacagtgctggtgagaggtgaaaccttcatcaatgtatgttgcactaaagggtgaacgaacacaccccttgatgttttatgctaacaaagggtggttgcaggacagaagtaggtcatgaggggtggaacctaacctaccaggcaccaaagtctctggggagtgtgttaaaatgcagatgctggggtcccacctccagaggctcattcagcaggtctgggctgaggccttgggaatctgtttttctggttttttgtttgtttgttttttgttttttttgtttttttttttttgagatggattctcgctctcttgcccaggctggagtgcagtggtgtaatcagctcactgcaacctccacctcccgggttcaagcaattctcctgccttgtcctcctgagtagctgggattacaggtgcccgccaccacacctggctaatttttgtacttttttagtagagacggggtttcaccatgttggccaggctggtctcgaactcttgacctcaagtgatccacccgcctcagcttcccaaagtgctgggattacaggtgtgagccactgcacctggctggaatctacatttttaacagtcttcacaggtgactggagttcctgctgaaatttgagaacctctgctcttaacctttcttctttgcctctaaaagccatgcctgtgaccttgagccttgtcttacctttctaactctcttgtgttgagggcaatggtgacaagagcctctggactttgaatgctcacaaataaacagtgggaggcatgtgggaagccctagaaggtctggatggccaagggagcctaatttcagatggactatagtgaaaattgcatattcattcattcagtcagcatacatttattgagcatctactatgtgtatcaggaaggaccaggagctagagaaaaaggtaaatagggatgacagagtccacagaaacccgcaatctggtaggctctgggttgtataactcaatgagaaagtgaagaaggtgaaggccttacttcaccacaggcggcaggtgggtgggggggagagtaccccatcgccaaggtctttgtctgaactcactccctgctcagggcaggcaagaatcccctttccagaagtaaggctgtgctgaccaaagttggctgagctgttctgtaacagctgcaaagcccatggtgtgaggggctttctgtctcattgcagcttcattgtggggatccatggggaaatttattatgaggtttagcagacattgctcaggccaccccagacttgcctctcagtttgggcaatctattcaaccaaactgccgggcaaacaattgcacattataattaggagagaccttaggggaggtcttctatgaggggttcatgaacctttgaacaccttgctactcaacgtgtggtcactggaccagcagcaccagcattctccgggaacctgttacaaatgcagaatctgagcccccaccccaggcctgctgcaccagaatctgcaattcaaaaagagaccacgatccccaggtgatacatgtgtacattaaggtttgagacccactggtctattgaatccattgggcaaaatgttttgcattgtctgtgagggatcccggagttctcgtgtgattttcacattgacctgtgactacaaaatttaatcgctgctttggagatgtgtgaagtccagggcagtgttgataaaaggttttgcttccctgatcaatccctgtgagtgatttggagctagagatttcttctagggttatacattatgcaagtatggaagatggtgaagaagtctatggaaggctgttgtctccaaacctggtggttggcctgaactcaccatagatcagcagggctgagagtctgagagacaggaagtaggggagaataaggaaaacctggaatgcacaagggacaagaagaacccagatctgtcacaggtgacctgcagaaggaagctgccaggaggctgctctgctcgcgcacctggcccaggactcactggagctggaagagctgcaggcctggcccataatcagcaacaccgagcaggtgcttcaacatcgcccagcccttctgagcctactggatgtgccttcacttctgccttccagttcactacaggtttcttttgtggccaaccttggcctggaaacataaagcagaaagaattctgggaagcacagttccagcttagatattgttgctgcagtacaagttgtcaaactcaaccttctcctgcgctaggtgagtactgtaacgagcggcggggctgggtgaggttgtgagcacctggagagtgaattgctttacctaactgtctgccagaataaatatggacctggagctgccagatctttgaattttttaggataaactagaatttggggatattatgtcaaattccctttttaaaatggtagaaaccaatttgatttttgaaaattattaaccaagaaaaatggttctgatgaaggggtggcctgcccctcacacctgtgggtgtttctcgttgggtgagatgagagactgagaaaagaaagagaaaaagagacaaagtatagagaaagaaaagtgggcccaggagatcagcgctcagcatacggaggacctgcgccggcaccagtctctgagttccctcagtatttattgatcattatctctaccatctcggagagggggatgtggcaggacaatagggtaatagtggggagagggtcagcaggaaaacatgcgaacaaatgtctctgtgtcataaacaaggttagaaaatgtgctgtgctttgatgtgcacatacataaacatatctggtgcattaaagagctgtattgccgccagcatgtctcacctccagccttaaggcagttttctcctatctcagtagatggaacataccatcgggttttataccaagacattccattgcccagggacgagcaggagacagatgccttcctcttatctcaactgcaaagaggccttccttcctcttttactaatcctcctcagcacagacccttcacaggtgtcgggctgggggatggtcaggtctttcccttcccacgaggccatatttcagactatcacatggggagaaaccttggacaatacctggctttcctaggcagaggtccctgcagccttccgcagtgttttgtgtccctgagtacttgagattagggagtggtgatgacttttaacaagcatactgccttcaagcatcggcttaacaaagcacatcctgcatagccctaaatcctaaaccttgagtcacagcacatgtttctgcaagcacagggttgggggtaaggttacagattaacagcatctcaaggcagaagaatttttcttagtacagaacaaaatggagtctgttatgtctgcttctacatagacacagtaacagtctgatctctctttcttttccccacatctgtaaactagacttttatcatttttattatgcccatttccctcattttatggctgtataaattgaggctcagagagggcaagtggttttccaaacatagaacagcaagtgtaatggctggactggattcagagccacatgccctccaagaaccctttgcacaacctccatctttctactgaggagtttcactaggcctggcccccagcctggagggtagagaagatttatttagctctctcacagacaatgcgaaacatttgcccaattaatttcttaattgctccccttaaggtagtgcttctcgaacttcaatatgcagagaaatcacctggcaatcttataaaaatgtcagattgaactcagcagttctggatgaggcctgggattgagaacgtcttgcatggtcccaggaggtgaggaacactgtcttcaggagctaacagtcccgctgggtcagggagcttccatgagatgactagagctgcacattaggattacctggagagatttaaaactatcccattgctgggctgcgccagagaccactgacatcagaacacagatgggtgaagcccaagcctcaggatgtttaaagtccctcaagagattccagagtgcagctagggttgagaagcactgaattagggaaagttggtatgaattttttggtgctagagggaagttcaggggtgggagggaggcaggaagggctttctagaagagcagcttctagagtttcccaagggaaggccctagaacggcactgtctgggacaggagctatgagcccccagttgttatgggtcatctgaaactgcattgagcaaaatacacacttgatttggaaaatttggtataaataaaataaggaaaatattttattaatcactttgatattgactatatgttgaaatggtaaaagtttgaatgtattgggataaagtatatcttaaaaattggtttcatggtttccttttgatttttaaaaacgtggctattagaaaccttacaattacatatgtggcttacattttatttctcttgatgatctaaaatcttcatcattaataactccttgatgatgcttgtatattcaaaagtctaaacaccactgaggtagtttggaactattgacataacttattgtctgtggtccctggaccggcagcatcagcatcatctggaaattgttagaaataaaaatttatcaggtcccactgaatcagaaatcctgggagtgtggtccagcaatcagtattgtaacaagcccttctggtaatttctgatgcatgctaaagatgaggaaccactggtttacatttgtcaagggggagctatgatcatgccataggcaagctttccctgagtcttttcccggaggggaagagtagcagttccaggcaggcgagcattagagagccaaagggcctggcacctcccatcaaccccatagcaggaatggggcgaactttgattgatgtaagaaaatgaaaatagatttcctttgttgtgtagaaactttttagtttgatgtaatccaatttgtctattttcacttttgtttcttagacttttgagttcttgtccaaaattctttgcccagaacaatgacatggagcatttcccctatggctatgttttcttccagtagttttatagtttcaggtcttacatttaagtcatttaagtctttaatccattttgagttgatttttttgtatggtgagagataggggtctagtttaatttttctgcatgtggatatccagtttccccagcaccatttattgaagaaactgtcctttccccaatgtgttttctgggtgtctttgtggaaaatcagttggttgtaagtgtgtggatttatttccatgttttctatcctgttctattgacctatttttaggtcaataccatgctgttttgcttactatagctttgtattatatcttgaagccagatagtttgatgcctctagctttgttctttttgctaaagattgctttggctatttaacttcttttgttgttccatatgaattttaggatttgtaaaaatttctgtgaagactgttactggtgttgtgataggaattgcattcaatctgtagatcgctttggggagtatgaatattttaacaatattatttattccaaatcatgaacatgggatatttttccatttatgtgtgtcttcctcaattactttcactgatgttttatagttttcattgtagaagtcttccacctccttggttaaatgtattcctaagcagattattttatttttgtagctattataagtgagattgcattcttgatttctctttcagatgttcactattgtgtgtagaaatactactaatttttataggttgattttgtatcctgcaaatttactgaatttattagttttaacagtttttttttttttgatggagtcatcagggctttctatatacacaattatgtcctctgcaaacagggactatttgacttgctcgtttcaaattggaggccccccttttttttcctgtggcctaattgctctggctaggacttccagtgctatgttaaataaaagtggtgaaagtaggcatctttgtcttgttctagatctgagaggataaggaaataatcaacagagtaaagagaccacctacagagtgggaggaaatatttgcaaactatgagactgacaaggagttaatatctacaatacataaggaactcaaacaacttaacagcaaaaagcaaatacagccggccctccctttctgagggtctcacatctgtggattcaaccaaatgtggattgaaaatgtagtatttgtgggacttgaacattggaggattttggcatctgaggggggtcctgaaatcctgagggatgactgtaatagattaataaatgggcaaagatctgagtagacatttcccaaaagaagacatacaaatggccaatcggtacatgaaaaaatgctcagtttcactaatcataagataaatgcaaataaaaactacaatgagatatcacctcacccaaattagaatgactatattattaaaaagacaaaaagtttcaaatgctggcatggatgtgaagaaagggaacacttagacactgttggtgagaatgtaaattagtacaaccattatggaaacactatagaggtttctcaataattaaaaatagaattatcaaatgattcagaaattccaccactgaatatttatttaaaataaatgaaatctgtatatctaagagagattcaaactcctatgtccattgcagcactattcacaatagccaagatatggtcaaccttactgtctggcaatggataaatggacaaagaaacacacacacatgcacacacacacacatacaaacacacacaccatagaatactattcagccataaaaagaatgaaatcctatcatttgtggcaatatgggtgaacctgaaggacatttgttaagtgaaataagccagggacggaaagacaaataaggcataatctcactcatttgtggattctaaaaaagctgccttcatagaagcagagcatagaatagtgtttaccagaggcaggggagggtaggaggaagaggatcatgcagacagattggccatgggtacaaagttacagttaaataggatgaataaattctggtgttttacggcagaatagagtttgagtcgaaagtataatacacatatgagttttacctctactttggggaaaggctttaaagccatattgaatagcaaaagagaaggaaaacaaacatcctctactggcttttgaataagctctatgagacctgcaagttactggacaccaaaggaaaagtgattttaaaacgtatcacattttgaatgccttccaagaagaacggtccagtagatgatggatttgtggctaagatcaaggggattaacagcttcttgggaagtctcccaggaggaaggctggcccgaggggatcagaactgctcccagtggaaagtagatgccacagtgatgtagctctgaaagagagtgcaccaggacaaggagaagttcctcttttaaaaactagacataacacatgctggttgcatgaggaagtggaaggaaaatttattgcctaacaaaatagccattctgctaggaaaacgtttgttaggcctatttgtcatgagaggtaaagtatctagtgttgcctggaatggggaaatattggcaaagaaagccacattgttttacacaataaagtaaatgtgagtcctccgtgttccagtgtgaaatgtttttcactctttgagacagaaatattcctcaattctagtttacacttctcagtcttctgagaagtagctcctaaacacaattctttggagtaggccctgaagatagatttgaggcagggcatggggccccaaggaagaatgggccctgtgtgagagtgggtggcagggtgggctggcactggaggagagagcagcttggggctcccacaatgggctgtggctgaggggctgagccggcatcatcaggcatcttctggcatctggtgtgaagctgctttctgctctgctctgatctgccttcgtcatgctctctacagccctcctactccaattcatcatgagattttatatccactaacttggtaggtaaggttcacctggtgtaaactgtaccaggtggtatattgggaaaagaaacagaggcgctgccacatttgggacagaatggagcagccacaatagaaataagacattagtgacgttgagcaaagcaagaagacaggcaaggtgaccattggaaagcccagggcctccttctcccacttcttagaatcttcggaaatattcgggagggggccagatagtccacggagattatgtgtgttgcagggggtgggcgggggccagttattttgcctggatgctgaagggctggaggattgcaagagaagaatgcagctgaaggttagtcatggtcacggctgtggtgtttccagcagtgaaactgacagccatggaggaatatgggaatccactttcctggatgtataacctggcttttcatcgtgacattcaaagtaattcacagcaggaaacttaacacgcactgagctctgtcttcatcatatgaagaggacagcagtttgcccattttataggtgagtatcttgagtccttaggaggatcagggtaatgtattgaaagtcatcttaggagtcagtgacggaacaacaatgtgtgtgctctgacgatgcaggtctaacccagcaatccttgttaccattgcccgagtgtaatacaggaggttggaagtggctttataagaaaaaaaattatgataataataatgatgatggtgacggttatgacggtggtgatgaagataatagcagcgaatatttcaatacattttaacagctccttatttgccatacactaagctaaatcatctacttggattatttcttcaaactgtcaacaaactaatttccatctagcctgaaatttttcatgctcagtaccattgacatttgtggctggataattcttcattgtggggggccatcatgtgcattgtaagatgttcagcagcatctccggcctctacccactggactccagcagcaacctctcctttcctagttttgataaccacaagtgtctccagactttgccaaatatccgctgggggacagaatcatcccctgttgagaatctctgcagaatcccgcattcttttccatctacctacaagatctcacccacatggggatgcagtctcttcccccagtgcttccagtacttgcccctgggcagccaggtccactgtgaggccactcaattcattacatcactcatgttgaccatgaagaccctaagtcatcaaggaaggttccactgggtgcagcaaatgccactcaggtagtcaggaaaagtatgtgctacagttaagaaatatctctaccctagaagggccctcactattttgtgtttatttttattttagatacaaggtcttgctctgtcatccaggctggaatgcagtggtgcaattatagctcactgtagccagttttattcttaaagacctaagacgcggtggctcacgcctgtaatcccagcactttgggaggccgaggcaggtagatcatctgaggtcaggagttcgagaccagcctgaccagtacggtgaaaccccgtctctagtaaaaatacaaaacttagctggctatggtggtgagtgcctgtagtcccagctacttgggaggctgagacaggagaatcgcctgaaccagggaggcagaggttgcagtgagacgagatcatgccactgcactccaggctgggcgacacagcgggactccatctaaaaaaactacaacaatgacaacaacaacaacaaaaagaaaacaaacaaaaaacccaaaaaacctaaggccttagctatctagaaagtttgagccccaaagtagatacatttttggagtgttcctcataatcaagatcttcctgcatttgcctcttcagaatattttacaaatgtttgtttttgattttcctgattgcctgtctttccttgagggctgggttgtatcttattcatttgtgtgttcctgatccctattacagcagctggtatatggtagggactccgaaagtatttttacatgatgggtgagtaagtgcgccaatgattgcttagtaacaaagtaacaaaggtctttgacgattccaggagctgcactggagccagggctgctgcctgactgatcagccaaggtaggagctgaagtttcatgggccagcagcccaggtgggctcatgaacacatcagtcctgggtagtgtggtggaggtggggctgcatgaatccatccccaactgtcatatcccagtgtctgatatgtctgcacagctggaggcggctaagtttgacattgcttcaattttctcactagtaaaatggggatacaaatgcgtatctggcagggttatgatgaggattaaattggaaaaaaacaactatttcaattgtgcttgacagagagcaggtgtccaggaaatttcattttccttctcttccctttctgccttttctatctgcctaacacccctcatgctgggaacttctcttctgtccatgttgctattgagactgttaatcacatgttccaaactgaccaatcagaatactcctttgttcctggtttcagtgattggtccagcagtgggcacatgacctgggaaagccaatgagagtctttcggggagggggactcgatataaacgcagggttttctctggtctgtaaggtggtgaaaatccgaagttgagcgcaggcggccggtttgctcacatcaggcctgctaactggggctaatgataataatgatgacagcttggattgacagcacacctgccatgttcctgttgccttacaaccactatctccagcctccctaccgtctagcatgtgccttgctccatacctgccttcctgaggtgcagaggacagcagcgtggagagatggagggacaatgggtgccgatactattgtttcgacacctgcatccggttttgcctgaagtcttttcatttgctggatatcttagttccatgagtcaatattcttctacttctttttaatccagtttattttaggttgttgtgacttccaatcaagaggtcctgactaatatatgattcatctcttttccttctttcttgtttttcttccttcctttctctgccctcccactcccttccttcaccctcttgctcctctctcccctagggtccttgtctctcctagttcctagcctggatcccaattttgtccttgtctttctgtccattcatcatatccgtggagtcctcagataattgtcatactgactcctagacatttacagattataatgcagatctttcaaggctcataggcacacagctctattaggagaaagatgcggtgatgttgacattttggatgagggggtcaaatattgttcagctccagtcagagccacacttcatattgcaggcttctgcctggttcattttcatttttatgcaagcaaaccatcacaagagcccgcctgtgtttaccccctgcccaggtgtattatgaacattgtctctagttcctacctgtggctcacatagctaaggacagcagggcttacctggctggggctgagcgtctcaggtgaaaagtgccacctggaggtggggttgagaatgaactccgcctgatggccatgtctgggtctggcaccccaggagtccactaagcagtcataggcaaaggatgccatttgtctcttgggttcactagtgcagtgggtgacttctgccagcagggagttggtggatattgcagggttggactgtgtttttcagaggagcggcgatgaattagcccatttattttcccatggtctgaaacccaaggaacatctgtctgagccacaagcggcacgttttgtggctggtgggaggacccatgttgcagggtttgattatgcccatcagccggggttgcttggaagcgtcagggagagctggtgattaatcaccaggcacagtggcatggatcccctgtgtaattatccctattgccctcagagccgattatgcttccaaagggtagcggctttcggaaggaggtgagtgcaggctggcccctttgctcacaccagtcctgctaactggggctaatgatgataatgatgacagcttggattgacagcacacctgccatgttcctgttgcgttacatccactatctccagcctccctaccgtctagcatgtgccaccttcaaggtcttggccgtgttcttctaacgctgatactgttatttacttcagttttttctttaaatcaactcaattttttatttaaatgtatttttaaagtggggtacaaaaaattagaaagaatgaataagacctactatttgatagcacaacagggtgactatagttaataataacttaattgtacatttaaaaataactaatcaagtataattggattgtttgcaacacaaaggataaatgcttaggggatgaatatccccattctccatgatgtaattactatgcattgcacacctggatcaaaacatttcatgaaccctataaatatatatacctactatgtacccccaaaaattaaaaattaaataaattaaaaaataaaaaagtaagatttccaactctcttccaagtagaaaactagtaaggctttctaagaatggaaagaaaccatacaaaatatgacataaaacatacaactaaatgctggttggtagtattgcctgtgaggacccagctgagccctgcaccctctttattatgatggggtctttaatagaggtgagtgctgacctgagactttttatgtaaccagagaaatagaagggcagttagaaaaaataaagcacttctcatcatgtctctactggtatacctcaaaaaatcaccaaggtctgtgtctcaggcatcaggggtgttcatgtatttgacttcccatacttctcactcctcaagttgggctctgttacgtccatttcagagttgaagaaacagagccaaaaagaggttgcagagagaggatgttcaagaagggggattccagcccaggctctggagatagaccatcattgttctgtactagatgccatgtgccaagttctgagcttggcacttcaccttcattaccttgttctatccacattcctgccctgtggaactgttatggttttcattttatgggggacacagaggctcagtggggtgcagagatggtcccaagctctcctggcagtaaaacaaaagcagagttcttgaccagggcacggggtgctgcagaggacacacattcccactctcagatgctgcttgttctctccacaaccagctgtggggcagctgctttgccaggggccctgagtgtcggcaacagccagaataacagggaagcagagagggagtttgctggaagggcttgggggaatgcacaaatgtagggcagaagctggagaaatggacctagaaagaaccagagcctaggcactctggtgtccgggaggcctcagggctgtggccagaagacataggcaccttttctactcttttgggggtcttctcctcaaaggtggggaccttgagcaagagggtccagtggatctgctcaggttacgtgcctcccctctgggcagggtgagatccttgtttggagagtcccacccagcaggattcacacaataggaagttgaggcggggggatcagggtgctatcataaagggtaagaaggctaagactaacctccgaacatgcagaagttacccactatatgccagttggccctgtgccagggggccttctatcatactatcctgtagaggtaacaagaagtcccagcctcaaaaaggggctggcaggctgggtcctagttcttctttgccatggctccagcatggacttataccctggattggttgtctcatttcaaagcagggaaagatctctgagagctttgcccagctccctggatgctctgctccaggtgatcttggcaccctcttctgggtctggcacccacacactggcacaccttccatgaccctgaggctcatgcagcctccagactcacctaccagttctcttcctgggattctcagctttctagcataccctcttccagaggtgggagacctccagttaaaaacaaaattgtacacaaccgcagcctcatttccattgtttaagaaattaattatcttggtgtatcttttccaataacagctttcattaaattaaacccaaggcatttatattccctgggaataacaggctgcttatatatggcgggaatgtgctggaatttctttagaaatcagcacattggctattgaggactagctggtgatcacaggtataggttttgaagttagattgtcaggattaaaatccaggctctgccattgctggctgtgtggtcttgagcaagttacattacctctctgtgtctcggcttgcccatctgtgcaatttggacagtaagagttcctatctcccaggcttgtggtaaggattaaacacgttcatgtaatgatcaacaaggttaactatgaacatgctcacaaagacacacatgggctcttctggcgcaatagggacgtggcctggaagctcactgccacgtggcatttgggaccacaagggatcagacctcatcgtctgtgcacagatagacaagatcataaagaggaaaaattagcatcgggaaactggttatttatttaagattgaaagcgggagaaatctgccctggacatcttcccctctcctctgtttgttttgtctgccaaacagaggcagtaccccctctccactctatttattaattgagtaaactccgtgatcctaaatgcaaacaaacatggggccagcacaaacaagcacgtgcttcctgtacgcgccacttctgagtagcagcccgagcaacaggtggactggctgggagacagaaacggctgcagaaggcgcctccaggatttggcgtgagagccctgcaaggtcagcccatgtgctccttctttgttagattgtttgttcattcatttgtttattcattcctttattcaagtgtttagtgagaacttccatgtggaagacaaagacctagctcacaaggggtgcatggtctagggagctaggtgtggacaaagagccacgtaggatgtcagtgctgagatgtggcagccacggggagctatggaagggggcagaaagaagaccccagagctcagggaaggcctgcagggcaagtagggagttgtcagcccagcaaagagccaagagtgtgaggagaaggtctgccagcgcctgaaggggagaagccatggttcaccagcttcaagagttgatacagttgaaagcatcatctctccatggccaacatcctgggctgtggctttaatttgggcatagtgtgtgcctgcaaaacctcggctgtattcaacctagtctgccattgatggagtgagaactgcccccaaattatttacattcaaatttggaagcaactgaaacccaacagtaggagattcattacagtaattccatggaaatggaataatacgctgtcgttaaaagtgttcaaatcttttatggttatgataaatctaataataaaatcgagacaatattagaatatatattttaacattttcctagttttgtgaaaaaagccccaaatatctgtatgagcctagataaatgacaagaaaggaaaacagtaagatttttataatggttattgctcaatggttggatttttaaaaatactcttctataatttctaaattttatgccctgaggatgtattacctccatagtcagaaaaattatgaaaggtatttaaaacccaaactggctttgggcatgcagaatgcttggttatttctgaagtataaaaataactccccctctgtcccatcagcacgcgtgttgcagggagtctgacgttgctcgctaagtctctttggtcgtttcatactaatgccctttgctcccctgattatctctctgaggttggggccgggggatgggggtgtgctaggcctcctggatgtctgtctgctgccaaaacatcctctcctgtctctgtctcattggtgcattttgatgaacctgtattgcctggtcactgcgcgctaaccaccaaattatgaaacatttgtgctgcaagggagctgagagatccttaaactcaatgaaccattaggcataagacacacacacacacatacacacgtgaatacacacaaacacacaaacagcttggctgctctgggtgaagcatgtgtgtgtttgggggaaatttccttccccacccgtggtcgtccatttgcccatgagcagcttccgaggcaggtccgtggaccccaacgctgtgtaacaccgtgtgaaaaacacaaaggcttgcagccctctcactgcagacgtgggaacacgactctgtttaaaacccttcaaagcccgccttcttgccgtgtgatgctgcctgggccagcagggcaggtcaccacgctgtctcttcaaagcagctcgctcatgcccacagcgctgggcacaagggcagccacgagctgtttgatttctgcgtccccagcagatggcttggtgcacaggggcagggctcgtctgtccctctcactgctgcgtcccaggctatgtctccaccatgtaacttcagacaagttcctcagcgtctctgtgtcctggttccctcatttgtaacatcaggatattgataaggatcatagtaatagggatgtccttatggggcctcatgaaaatgaagagttctctgtgatgtgcctggaaccacagagggcagcaagtgggagccacagaaagtcatctctttatcatagttgtcattggtaactatgacggttatcaagggcaggggtctcccaccttctgcatccaggccttgtcattccttataaaattttctcctttcaaggactttcaatgccctgaaaacggaatgctcctccctgctccccatcagctgctgcagagccctgaaccccttgaacttgccttgcttagttctttcaggggctgccttggatgccacctcacttccctcttcttggctctgtggctgtcagaggggctgggcactgggttacttcatcagttcctgggtgttgatcggcaggaaacagtggtttcctgttcatatcctgcctgagcctgggccgggtggaggtgtcctgcatggagtcttgtgaaatcgcgtggactgcaacacccagcagcgcggtgagtccaccctgaaatccacagtgacccacgcggcatgtgctgggaattgaacgcttggggaaagagctgggctccagcggatcagccccgaccaagtcgttcccacagctcaggaccggacgctacaagcccactttgtagcagtttggcggacggcaaacttttgcaacacagtgcaaaaaccatttaacacctttaagggaattggaaatgggtttttcatgtgtggtggtgctgaaaattgagaataatgacagaattattaaaaacagccttctcggccttagactcttaattgcctctggtctgtaaaactgacaaataagcactgtagaagccacagatgaaatatgtcgtcttgggagccctggagaattgtctctgaattcttttgtttatggattgtagaaactgctttgggggtagttggatgtagaagcagaaggacagagtggggagctgggagcaggaggcctgggtttgtctcctgagtctgtttccactggggcctgaggctcccgtgtgagggaacatgaatgggccaggcacatgggccctgtggggtgacagagctgtgggctccatggtggctctgtgggcagctagcttggggatggctgagataaagacaagtagttttccttcctgcaggacttctcagagcctttagtgtggttataatgatagaaaacagtattaagtccataccctgaaccagaaacaatgctaaaagctttgcacttggcctttttttttctttttcttttatcaacatgtgtgaggacggaagcttaggcttacagatatggactcattgagagtgagtggacgtgtctgatctttaacccagttctgtctgaccaaaaagcctgtgctctaaccactgtgcacccctgcctgtctgtcctgttgagagaactgtagggaaagccttgagattatgtatccagtgctcccctcctcctgattggaagatggcagctcagaaggttagggtgccttctcctgtcctccgagtggttagatgcacgtgtcctcttctgtcctctgctcttcccacatccctctctctctggtgctctggtggagcccctgggatcaggggtcacaggagcacctgggccatttgcatggttgttggtaaagggtgttcccccaccccccattaaggtgcctgccatcaaagtgccttattgcttgagttccaatctcggcttcacaactctgtagctgtgtgactttgcacaatgtactgagcctctctgtgcctgaacatccttgtttgtagatagtaaagataattgtcccttactcctaggtttcacattgagtgtttagcaagttaacgtttgtaacgtgtgaagtcataagatgcaggactggatgactgccctacccacaagaggcctaggatcttcccaagttgcactacttatgggacaggtctgccaagcagcccttgtgaagataaaggtggtgatgagttcctcccacaaaacaagagcctcagagagactggaaaataacccccggtgccttttatcaactggccagcagatggcagaagcaagccaggaacagagcttgtgtgcggcggctgtggcagctacctttgaaaatcccgtggtgtttggtggtcgtattaagagatctctggtgtaggagcatccttcattctaagcaggattctgaacaaactcagaactggctttgtggctggtaccgaggacccaggggtcacggctgctcccagtgggtgctgatgcccatttgtttgtgcaagttggtcccctgtagggaggacagatggtctgtctcggactttctggcctgtgcaccaaggcccagggatggaagtggggcagcatgtccccatcattaaatagggcgttcttgataataatcccataaggcctaatgtgatgggtgtggtcaatcattcattcattctgtgaggattcagtgagcagctactccatgcctctaggctctgaggacgcagcatgagaaacacacggaaggcccacgatgaccagggagctcgccttccagggagagaggagaaaaataaatggtagggagttaaacacgacaaagtagaaaagggccagctgcaagaatgaaattaaataggaggctggtggcaggggggcagggaagcctgaagcacctgactgcccagaacaagccgcacctgtgaggagctgggaagggcactccaggcagagggagcaccagagcaaaccctgggagggggatgagcctcttgttgaagaactagaaggaggccaatgtggctgagcagaacacatgaggcggaaggaggaagtgaggggccctgggcctggccaccaaccggcagatcaggggtgaggactccacttgggagagtgtgaatggcccagtgtgaatgacaaagcagtttcatgcagctcagcctgtctggctaagtgcgcagccctgaggattgggctctgagcgttgcagcccttctgagtctgtgggcccctctcccaggaggatcaggttgcccagggcagctggaaatgtccttaagtgactccttgctgctgctgccgctgcgtcttgctgacatcatttccccgcaacaagcgctggtctcctggggcggctgccccctctcatctgcacatctagctcccctgccaggcctgtgctgttttccggggcctcacagagaagctcaggcaggtggagcctcagcaacaggcgccatcctccccttcagcctgtcgcggctcctccctggggcatgcttgaaagcccagacatgttcttcacatctgagaaagcagttaaactgaaattcctggcagactcaggttcaaatccttattaggctgttaagtgagaggggatttcatttccttgcagccgccctgggtcctgccactgagcagctgttggtaggctctgctgtgaggtctcctcttccggctttcccacttcccaaggtaacctggtgtggggaggaagccgggggcctctggtgaatgggaacctgtgcaaagaaggagccgagggcagggagaggtgggataagacccagcgtgggggcctgaaagtgaggccagcagagagtcattgagaggccctcggagaatacgttctggggacgcagtcagggaacacctgtttcctgctgtgtgactctcacaacccagctgtggacacacacgtatgtacatatatgcacacacaggaacacatatgcacacacaggaacacatgcacacatggacacacatatacacacgatgaatacacatacagacacacattcatatatacacacatacctatgtatacacatgtacacacatacactcacatgcacatgcacatatagacctacagatacataaatgtacatccttatagatgcgtacatatacagtacacatgcatgtactcacaaatacttatgcccacatctacatatatgtataatacatatatacacatatagatatatacatatatactcacatgtctatgtataaacacacacctatatgcacatgcctatacatatatgcacatacatgcccacatacacctatgtaaacatatacacacatctatatttaaatatgctcatgcatgcatatatacacacatatatacacatttatgcatgtgcattcatgtacatatacacacatgcactgacatcgacacatgcatgacacaatgatatagatatacacacatatatacatgcatgaacacatctatatgcatacatacacatatgtggatatagaaaaatagcagatatacacatacatgcacatatctgtatgcacacatatatacatacagataaacacatgtacattcatctagatttccacatttacaagtgcatattggtacacatatgcatacatatgtgtatgtatgaatcttttctccctctatatcacacacataccttttgctgagggcttagtatttactaggtgccagactctgctctcttaatataaggtcgccccaaaacagaccctgagctgaggattcgggtgcaagcggctaacatggacggtgatccagcagcaccgtgaggaagtggggctgaaacctggaagggagcaaggccggggattagggtgaccacagacaaggccatcactgaggaccttggggttcaatttctccagtgggggtgtctaagccactatgttgcgtcacgtgtcagaattgccctctggaggactggaaaactgggtgttgactgccacttcctgctcctggccatgaactcctggtgcttctagtttgcccagcataggccatgtgctcctggggccagcgagggtccacaggcagaggctggggacctgtgctgcaggtgatcgcaggtgggccctgggccaccacacgctccacacaggtgctgcctcatgggtctttcacaacaacccccgtttgacaaggaagaatctggggcttggggaggtctatagatttgaggggtgttatgggcgaggctcatagcagaaccaggtcaagaatcaaggttgtgtgattctagcaggtaagtcctgacaatgactggcaagtgtgagccatgcaggggcaggacaggcctcatgagtggtgacaggaggtggttcagggttgttttgcacagccaggcattctttgaagggcagctgcagtgaagggcctggctgcacagccagcctgcctgggtccagatcccagactcaccatgtcctgagggagcttgggggaactgcctgttccctctgggcttagtttctcgtcaacactaagaagactcagttgagtcatgttcatgatggagtgcttgcaacaccaccagagaggaagggattgtgaatgaggccgtcctggggaagcgcaggtgtgttggggtgggcgggtaaccaggtattgcgacaggggcacaaggtggcactcagcctccttgtgtttgtagcagacttttgaacactagactttctggtggcacctgtagcacccttaaaaagtgaatgctgctgcccaaattaaatctgagcagactgaactgaacgtcccagcataacctcaacgtctctggggccccatctgccctgctcttagcatcccactaagagaagcagcagacactcaaagcaattggaaaaatgacctgagttcatccaaaccctttaaggagaaacctctctatgactttccctacgattctttcaccccgtatttctcccctcccatggtctcactccagagcttttccagagcccttttctttcccagaggctccttggagccagccctcacggctctggccttgttttctgctccacgttttagcatgaggcaggcatgctatacggcaaacatgacattttctttattgggtaggggaagaggagggctgaacctctagcgcccgaatgcatttgtccctgtcacacacagtcattgtccaattaccttttgggagggaaaacccagtactgatcactccgcctactccagtttttcctgatctgaatgatctgccttaacaatgtgttaacattttacccaagttcactcagaataagaaagtgcgtagaggtgcccactagagggtgggcgcacagcagtgggcatctcggctctctgcccgtggggatcctgccaggttgttcagagcagctcctcagtgtcactctcctccccaccctccctttccttggggtctagccgtttctagctcgtgttgcccctcccaagctggatgtaacctagcttctgtcttttacctgttacctcatttgtgcagttaacattttatgcacgtcccttacagtgtagaaggaaaacataattctaatctgactccattcagtgatgttaaatactgcatgtgaacatccccatccagaagttcatccaatgtagactcatcaaaaagcaggagtcctaaatgtttgcattgtgcaagcatccttagcacattgctatataggtgtttaagagtgtcttaagagatatttggaaaattggttggggattgtttttgttggcctgggaatgtattattattttttcccagttcacataaaggggtgaagccctgatgtctggaaatttgctctccaaagtgtttccaggaattgacaatatttggataatgaggggtgtctgtactttccttgacctaaactgctggtagagggggatatttttgtatgattgggcaaggtcaaacacagaatcaaatcaggaagaacagggtctgacatgatgaatccctgcctcgccttgccattgacaagagacagaataaatgcccccaaagaaccctgcaccatgaacgcttgatggcaatcctgtctcagggctttgctgctcgctgtcaggcagcaggtacactacccagggccgtggggaaggcgtcttgcagccacactgcagcaggaggctggtcatatctacgggctccaccaagccaggatgcagagctcggcccgtctcatggcacaggctcgggctgctcggagcttataatgaattagagccacagctgattattttcaaggctggcgctcacgctgggtgcctgagaagacgatgaatctgcagtgccgaagtgctgcctggcctctcaggaaccagctgcagctgggattctctgcagccttccccgcagcaagctggggtagccatgagccctgcctgtccaacgtggggtcaggcgggcatgcctgctgtgtctggcagccttgacacccccagattctgctggaagatgctcgtggcctgaaagctcattttgtagtcgctctaccctgggatgcagcttctgcactggcaggattaacgcaaacagaatctgcttggctcattcctcgccgggcctcaacaggcctgcaacgccactgtctgccagggagagccactcggtgatactgttaattaaaaccatgactctgggggcaagaaaaaattttaaaacgctgaagtcatcttccctaatagaaatcttattttgaaggtgctcacggaggtcaggctgaccagaaaaacccacaagccataaataagctcaaatagttttatttaatttacttaactcggtgcctggagtcctcatggggagaggtgcctggcatcaacacagggtgggggtggccaccctcatctctagcccctgggtcccagagctgagaggagggagagaactgaactttcttggaagaatgtggaactgctgagtagatgctttggaatttgctgacccaggcatctgggagtacagcctgaccggccatctctgcgccaagctatctatagtccaatggctattttcaattggaaattcattttaaagtggtggcagtgacgggggagtggctgtatctgtaatccattatttcacacagagaattcccttctttcatttttttctggccaaagttgctgctttgaacgtgggtgggtcttggagcccaagactgagctggctgcttggagaaaaattggagggatttgaaaaggcccgagggagggtgtcctctgagttgggggtggcagaaaacatcttaaatgtgcaggcccaagccttctgcagtgaagggaataggactctggcttcggcagacctaactcagtctctgggttcttgggctaatttgtgaaattacctctcccctcaggactgggagagaacggccttaaataagtgcaatttaattcccttgattgtggtcctctttaatgaaaaaccaaaatttattctctctcctgctagtttcccattgaaagtcacaagaaatgaggctggggtggagggcctggagttgctatggaagcatgatgcctagaacccactatgggatggatggtcattggtgtcacggactgtggtgtagacattgtctcctgtgccaggatgtggcctggtcctgcacccctttgcctttgaagctgtgcctgcctgtgatctgggagtggcacgaacccacagaacccagcccaccctgcaggaagtgggagagctccccgggtactctggtgctgaggaagcacagcttaaagaggaaatttccttgaaatccacacagacctccttccagaatgttctggaaggaagcacaacttcaagaggaaatttccctgaaatgcacacagacctccttccagaatattctggaaggaagcacaacttaaagaggaaatttccctgaaatgcacacagacctctttccagaatgttctggaaggaagcacaagttaaagaggaaatttccctgaaatgcacacagatcttcttccagaatgttctctaaatcctcctccaattcaactgtcatcaccacagaacccacaccctatgataaatggccagagcccttactgtctttgttttactccaggcgtctcaggccactaacaaggaggtggaggtctcaaggctattgtcaactgattctgctggaggccagaccaaaatggctttcttccgtgacagcgtcagtccagttacaaatctcccggttccatgataaaggatttggctgggctatggccctggtttcttggaggaaacctctaaatccttgaaacttcccgagtgataggagaatctatgttattcatggtgggcctttccaaccatacctgagtttatgcttatgaaattaccaggatggaagctgaccacaccagaaaggtcagccaggtaattggaggcttggggctttgaccaacatgacgtcagtccttcagtgagtggaggagggctggagattgagtttaattgcatggccagtgagttaatcaatcatgcctatgtaacgaaactccaataaaaattctggacatgggctcaggtgagctcccaattagtgaacacatcaaggtgcctacaggtgatatgtcctgatccacagggtgatgccatggaaccttccaggcctggccctatgcatctcttcactgggctgggctgtatttccaccatttgataataacactgtaatcttatcactgcagcagtttcctgagttctgccagtcgttctggcaaattatgaaacctgagggggttgtgggaaatgccaaatttttggccagttggtcagaagtgccagttctggggagcctggagctcctagctggaaattcttgtggacagtgtacctggcctctgatgtctgagccagttctgggtgttgtgtgttgggatggcactgcagtccctaaagcaagttctggggaatggtaggaaagcatccctgcatctatatttccatttggtcccggtctaaagcagctggtcctcagaattgtctagggggcttttagaaagaagagccttctggaacccttcctgaacgattctgatcccatagtcccgcaatgggccctggagtctgtatttttgaaaagctttcctaagtagtactgaggcagaatcatatttgagactaactttccagtgcagccaggcatacctcccaaaaagagaaaatctgtttgaaagaagggaaaatgcagaaaactggggaggccattccccagtgttctaacaagtcagggaacaaagggacggcagatagaaagttccatgccgggaggtcagtgctgcagcctgcgtccttacgctgaggtcagtctacgaaaaggcatatttggtgaccctgcatccctttctgggtgttaagctctggagacacttgcgaggccttcttccttctccatatgtccccccttggacctttcagatgtccttatggtcctgacatcagtatcctatgatgggatgcacatgctcgacctcggggaccagctggaagccctagctgctgctggcaggggccaggaccctcagcactgagggtctgggtagatggaactgcacaccttgcatctggggcgaggaagcatgtcctaagaactgagtggcgcacgaggaattcacgtgacagtttctcaagctggtggccttctccctgtctcctaaaactgccctgagctgcctctgtctcccaccggggtgacagccacatctcctctctgatctccctgcttctcatcttgcccctatgcagcctgttctccacacagggcgatcctttaacaagtcaaccatccatgtctttcccttgcttaaaatcctccgaggctcctttgcactgtgaaaattagagcaagagccctggggatctgtccttgcctgtttcctccccctcacttggtcctgtcatgcatcaaatcatagccacatggtttttgctttctgtttttcaaagaatttcaaattctcttctcccacagggcctttgcacaagcttttcccacagcctgcaacacctgcccttcttccccacacttggcttgttcccagaaattcatcatcctgtcttaaatgtcacactcttcagagaggccttctttagcccagatacataggtaggttgaccctattgttgtctgtgacattatcttcttgatgtctttggacttaatcacacttttaaatatatatttgtttttcctgtctcttccacgaggctgttgaatgctgcatggacctgtgcccggcacagagaatgtgctggtttcagtagagtaattaatacaagcagcagcagtgaataacccagacaacgtcagtggcttatcttggaaaggttttttttttttgagacagagtctcgctcttgtcgcccagtctggagtgcaatggtgcaatcccggggctcactacaacctccgccttctgggttccagtgattcttctgcctcagcttcctgagtagctgggactacagatgtgtgccaccaggacctgctaatttttgtatttttggtagagacggcgtttcaccatgttggccaggctggtctcaaactcctaacctcaggtgatccccccacctcggtctcccaaagtgctgggattacaggtgtgagccactgcgcccagccaaaaaggtttatttcttgatcacatgactcagccagagcaggtgggcatggacctctgctctccccactccacctaaagaaccttctccacctcctggtctccttacctggaatatgtggcctatgaggtttgccaaagaggagaaaatggagacacactagctgttatcagcctggcagccacaggctcacttctgttcttggcccatttgcctgaccagtcctgtggctcccaccacctgcaggagagtggggaacagaggaggcaggaaagacactaggaagagtggggagggaggagaactgcacagctggagagggtaggagggatgctgagtgggtgctgctgggaggagggtatgtactactgggaggagggacgctgggtgggcactgccaggaggagggatgctgggtgggcatttctgggaggagggggggagggggaagagccacacagcccgaggtccgtggcaggaggagatgacaagcagggagaacaccaacggaataaactctgcagtttccttcagatcatccctgcataggtgtttctcgaaactcatgttcagtgagaacagcaggcatagactcaggacaaaccctccatctcctttcaggttaggttggcccatgggctggagcgtctgcgtcttggtcggcccggcagtgtacatgtcaagcagcgcgcaaagactccacagccattcgtaggcactgctggcctcatgctccagacagccctgggacaatgggccaccaagggaaatcaatgattgcgtgggcgcaggtgacctccagcctgcttcagggccacccttgttccccatgccaactccctccttcctatgggctcccaagaaatgggtggcagagaccagcctggtgatttacctcctgcctttccgtgacttcctcccagtcctgtgcatctcatgtttaattatgaggctgtggaaggtggtgatattaattatagggctgaggttgtgttacttggagaaagtcagtgcacatgtcatttgattttcctcaagaaggaaaactgtattttttccgatctcaaaaataattccagggaaataaatgtgtacaatcacactttggggtttaaaactaacgagtttcagttttaaaacatgttaaaaacctttctatttggagaaagctggaagaatccactttggggatctggcggttctcaggagctgtattacctcgggatggtctcactggttggtagcagcttttgtatgaggaggggcatggggtcccgacttaggcagagaaggctttgctgaagaggtgcaaagcccagcttagggctgggttttctacagaccaggaacaaaagcattgcttggcaagatttcttctctgctcagagaaaacacgcagattccaaagagtgagatggagagaatttgacatgtcttggtttgaaaataagtcaaaagaagtctaatattaacaatagcaataataataacaaccattaattgtgcctgcgttaggtaccaggccctattctaagtgttgtgagtgccctctgtcatttaatctccacggagtcctgaaggtgcttcccaggtttgtccccatcacacagatgaggcaatcgttctgttaagactgtccttgggtcattatgtcagcaatgaaatcggtgctgccattactaaacccttactgtgtgctggcatttgtgtatgcatgcatgtgtgtgtgtgcacacgtgtgtgtttgcgtgtacatgtgcatgtgtgtgttgtgtgcctgtgtgtgcacatgtagaaagaaagtgatgtgtgggaatggagaattccaacccaggaggagactgtgcctggggctgccatgagaagtggtgacacttcgagaaacgggttccaaatgcacgttgccttccagttctctgtgtgaccttgggcaagtcacttcagctccctgagctttgtttttaaaaatattttttaaatgtataaaaccatggaccattacatatgaagagaaatgtgtgtgcaaacattcagttaataatcacaaggtggaggagtgcctgctcagacccagagctgacacagggaactctcccagaaggctgcagggcttccctcccaaccctccaacggcccagttgctgagcccgtgcttatctgttcagtggaaatgccatgtgccacgttcctcagaagtaaagccactaggtaagtgtgacactctgtgcccagcttggtgcaaagcctcttgtgtgtgctatcttattgacctcccaaatagcatggtaaggtcagtactgtcacttcccccactttgaagatgaggagagcacaaattctagatggaaatggaggtcacgcagtggaaataggatccagacagattaatccaatctcaagcctgaattcttccattccacgctacgcttgaagctcaatctctcttcctggttgattctccccacttccccacccccagatatatcccatcgctgcttggtggacagtagccatgactgggttttggtaaaggttgctgaataatcaggctgctggttagtttttacatttcacctttcccagtgaaatggggccccatgaaaaaggcagctcaagttgtaaattactcaaaggaaggacagaaaggtcttctgtttgcacctaccctaaggatttggggtagacactgggaatttactaattatgaattccagtgctttccttgctgaaagagaggcgtggaatcaacgctgagtgaaggcatcaagtttaagctgctaattacttcctgatcatgcagaataaaagctacgtcccttgaaatacaccaggcagctaaacataatctttgcgtttccgtagtgttggttaaggaatccagatgttactgcaataaccactccataaacaaaaggaacacccagctgtgagaactggcttctcagcattcgtcccagcagaggctcttctggggccagccctggaagaacccatcagggttctgatggttgccctgtttcagcacagcccttattggcaggcagacggctacgggcacagccacaggctgaaggtgagtccagcacacaactttctgacagtgaacaggagtaaacatgggacccacccgaaacctttgtctgttgacttcttagcaaatggaggcagctctaggctctggagagttcgggtataggagaccatgacttgagcagactgatataagtggaatgcaaacatatttagatggcacaacttaatttagatttatcagtgctaatatagaaaaagctagtatttattggggcttattagatttttagtctgaatcctcacaacttacgagggggttcgttttacagactatgatcttgcatgatttccccaaagatgctcattaagtatatggtgaaagtagaatttgaatacagaagacctggttctgctactttctgtgtttctatttggttcaaaccagcctttcttctttcaaaacaacttcagtgcaattcatggttttggaaaataaacttgattttgagattcagacaataagtgcatttttaatgtttattcttttatcttgaaaaactgatatatttatgaaatgatatgtgctcactcagtgtcaacacttcaaacaacacagacagtacaatgacaaattggagatcagctctaatctcggcccccaatttaatgcattgctgaatattcttctgaacatagtccatcccacactgtcccatgacacaagacgctccaaggggctgaagatagagggacttctgcagtcaagagagctgggaaactcttggacagtcacaatgtgcatttgggtattaaaggctctgcaaagttctgcaccaaataaacccttggattggcttgatccaatgccatgtttccaaaacctacttgcccgtgggacaccttagtccataacacaggttggcatttcttctagagagtgtgctgtgaaaaacactggtctcacagcaccgtgcattcatccagcaggtatttaccaagcagggactttgggccaggtccgtgctaggctctgcaggtggaccagccagccctgacctccatggtgtctcttctcatgggagaggctgcacagcagtcattgagaaaacgaagaaacacacaggtactttcagatgctgataatgactaccatgtgctaaaagagctccaggtgttgtctgttttgagacaatcttctcgacaatgagatagaatgaaccatgcaaactttgggggctacgatggttttaggaaagagctagagtgaaaaatcctttgacatatatacatacaaataaagatacatgtgtataattttatgtaattgacatcacattatatgctggcacctgccttttttgcttaatgaaaatgtcaaaggtaatattaccaatcaatcaatatatttcaccatcgtgtttaatttctgcagagcacttattcaagcacatactgcatttttcttagtcactcactggtgggaatagaaagttttctcaggcatgcatttttcccacttctgaaatgatctccttagaataaattccccaaattgtattgctgggttcaaaggcatgaacattttacatttttatacaataatgtcaaactaccttccggaaatgatgctcactttactttccctccaagactgtgtgaaaatgcccattttcctaaatgcttactatgactggtttccaactacattttaattcttgttcaatctgataggcaaaaaatgatatttaatttttatttgattgataatgaccttgaacgtgcccattagccttttgcatgtattcttttatgaaacatctgttcctatccttcgtcaatgttcctcttcatatgttaacttttcttattgatttgttagagcactttgtatattgtgaatattagcttttgtgatcagaattatggaattgttgttgtctttagttttgcttatcaagtttaaagccattcagagatgttgtaaatgtgtatgttgttaaatttatgtcttattttgtgttttctgatgctcatatgtttagaatggtcaagcaatcccaacttatgattacataaatattctcccatatttgctcttagcattttttttcttttcatgtaaccctttgttctttcaggaatttactttgcggtaagaaatgggctggcttccagttttatgtttcccaaatggtgattcagctgttccatttccatattctcccttattagaaatgaccactatattatgttctaaaatatctgcgtacttgtgtcccttcctataatctcagttcatctctttgagctatcttttgattcctttttcaaaccacactgctttactgaactgtcatcatcttatacatttttaatactcagcaagacaagtttctcaatgccactctttttcagagtttttctggtggttgtaagatgtttattcttctggataaactttagaatcactctttttgtccaaggtaaaatatatcccacattgagatcatactgaatatacagactaattcaggaaaaaatgtatgtctttattgcattgagtcttcttatccaataaaaaagatatgaatttccatgtattgaaatcttcactgagacttatttttggcttttcacatgtcctgcaaatgtattgttaaatttatttttaggtattttaggggaaatgattttctaaagtttgtattttctagcttgttataatttacatatgagatagtcattgttgtatattatttataactgatcatattactgtatttgtattgttttaatagtttttctattattttgggttttcctggaatacaaccttattatctacaaattatgattgttttgccttttccaatgttcataactgtttttatattcttgtctgattgctttgttcagcacttctagaataaagtcatgcaatactaatgataaagggtactctgaacttgtgactctcataggatgcggacagtatttttacaagaaaatttgatgataatttttggattggaatgtgcattaaaaaaattctacggtgctcacacctgcaatcccagcaccttgggaagacaaggtgggtggatcgcttgagcccaggagtttgagaccagcctgggtaacataccaaaatcctgtctctacaaaaaacaaacaaacaaaacccaaacgacaacaaaaaaacccaacaattagccaggcatggtggcacacacctgtagtcgcagctactcaggaggctgaggtgggaagatcacttgagccctggaggtggaggttgcagtgagctgagatggcatggcgccacagcactttagtctgagcgactgagtgagagcctgtctctaaaaaaaaaaaaaaaaatcaaaaaccaaccaaacgaacaaaatcttataagaaggagttattgataatttcaagtatcagaaatggatgttaaatcttatcaaatgtctttatgacttataagaaatgatcatatacttctttatcctttgtcctattaacacgttgagagtattttttaaagtttcccaaaccatatagctcctggattttgcaaatgagttccgcatcatcatggtgtgttatttaccagcgcttttctcaagctttttgggtgaactttctctaattaccttttctgcggggagtctgtgtcaggccctggcattcaggttatgctgactgtggagaaaccattcagtgactttttgtctttctcaatgtactggaattgtttccatagtacagaaataatcagttccttgaagatttgagaaaataagactctggcaagcagtaacttctatcccactgttgggaatataaatggtttcagccactttggaaagtcttttgttaatatctagttaagtcaaaacacttgtaccctatgcttccgcaactctactcctctatctgggccctagagtcacggtccccagcgtttttggcatcagggacgggttatgtggaagccagtttttccagggactgggttgggtgggggatggtttcaggatgattcaaacaccttacatgtactgtgccctttatttctattattattagcacaatacatttattgtgcactttatttctattattatattgtaatatacaatgaaataattatacaactcaccataatgtagaatcagtgggagccctgagcttgttttcctgcaactagctggccccatttgggggtgatgggagacagtgacagatcattagtctttagattctcataaggagcacataatctagatccctcgcatgtgcacttcacagtagggatcacgctcctatgagaatctagtgctgctgctgatcagacaaaagacagagctcaggaggtcatgcaaatgatggggagcagctgtaaatacaggttaagctttgctcactcgttggccgctcatctgctgctgtacagcccagttcctaactggttcctaacctgtaccggttcacggcacggggttgggggccctaccctagagaaactctcttatgcatgcccaagaaatcgtatgtgtcagaattttcattgcagtgttgttcgtgctggttaacaaatcagaaatgacttaaatgttccttagtagcggattggattaggtaatttatgtagtggattactctgccacagatgaaatgattaaattaggtctactgatatcgacctgggaaattctcaaaaaattagtatgggggaggagacagtgagaagaaagtgaaaaagaacatgttcatcatgatacaatttgtgtaaaaataacaggaaacaatgttacatataattttgttatataacaaataacaggaaataatgttatatataattttgttatataacaaataacaggaaacaatgttatatattattttgtgcaccaagtgtggataatatatacacatatatcatcaaaagcacagaagagaggggtattaatcaccttcaagaatcagggtttcccctgtggagggagggagcggagacaaaatggtaacagagaagtggagcttcaaaggtcttgtagtatttcatgcattaaccaaaaaaggtctgttgtaaatacagaaacacatgatatctttgaaagctgtgtggtggggcatggatatttgttatattaaccacacttcatttatggtctttatgaatttctatctggtttctccattaaggattagagaggtatttcaaaggctcctattgtatttctaccaattctgtctgttcatcttccttttaaaaattggagatggaggctggacactgacaattgttattctttagatactttgagttagataacacagtgcttggcacggggcaggtgtccaataagcgctaggtggcatcatcatcctcttggacactttggctctgtgtgcatccctccaaatcctctgttcccttgccttggtgtgaagccagtgcgcttcaggtgaacccccgtggctcccagctcttcccaggctgaggtgggcatggcgccccatcgagaagttggagcataggcccttgtgcttggtgagaacattatgtgtgtccctttttgactcctttgacttgcaacactgattcctaggttacacttcgggactgcctgccagttcgtgaaaatgacagggctgtcccttctcacctgggtcctgctgttcacctgacctgctggggtggggcaccagcccaggcagacagtttctctttcttcctggtaacctgtggtccaggccccactctcacatcttctcttacttgtccatgagctaaagtgactcacctcctttgcacctttcactttgacctgatttggattgcttctggtggatttccatcagtgtggcatggcggtgtgctttccccagtttcagggaaggctgacttaactagtctacttgtggatcctttgggtccatggatcttactttggggtgattttgcatgatggggatatttggcaatgtctagacacattttggtcatcacagctgggcagggacagagggagggtgtgctaccagcatctagtggtggagaccagggatgctgctgaatgttttaagatgcacaggacaggccacccccctttaaacaaagatttatccttgaagtataaatagtgcccaggctgagaaactctgccttaggcccaatgagccaattttactctggtatgcctcactttgcttcaacagctgggcttcggagagacagcatgcattttacattgatgtggtctgatgtaacaagcaccaggcaccttagtatcataatatgactgattagattatcatttgcattgtcattttgttaatgtgtagaggaggaaatattactggaagtcagaagatggatctttgttatgccaccttcttccattcatgcatgcgtttaacaactatttacggagcatctactatgtgctggatatcatgccagatgatgcccttttagtgctctcagtccagcaggaacacaggggaaaaaacccaaccaaatacacagataactgtatgtcttggagatggtagcgtgtagcagaaaggaaataagagcatcagggaatccacccatgtaggcggtgtcttagcctcctgtggctgctgtaacaaacgccgcacattcaatggctccaatcactagaatcatattctctccaggtgttggtagggccttgctatttctgggggctttagggtaggatccttccttgcctcttctggttttcggtggcatctcctggccttcctccctgtgtagctgcatcactcccatctctgtctctgccgtcatgtagacttctgtgtctgcatcttcttctctcctgtctcttgtaagggcacgtgtcattgatttagggcccactctaatccagaatgatctcatctcaagatctgtaattacatcggcaaagaccaggcccttctttccaagtaaggttacagtcacagattctggggattaggatgtggatatatcttttgagtgacacttttcaaaccactacagatcagcaaaatgttccctggaagcccctagctgatttcttttctgttttttttttttttttttttctctttaatcaccaaaaggagataaatggattaggccaagcgagattcatccacttttcctaagcacattgttgctcaaacatagatttctaagaatcaagaagaaggcagggagccagcagggtctgccccagaagctctccctgattttcagatatgccaaactccatcttctctgtaggtttttttctttttgcttaaaacagcagttctgaagcttgggaaggcatcagcatcacctgggagccttgctaaaacgctctctcctggagtttctgctcacaatgtgcatttctaaaaagctcccaggtaaggctgatgctgccagtccaggggccacactcagagaaccactgctctgaaacattcttcctgctcctggctcttgtcactcttgtcttcccccttgaggctcccttttgcccagagcttcctggtgtctccaacccatgggtttcaccctttccttctcttctgtggcatttaccacagaaatcttcccttcagctccacacagggcacatgtcttgcaggcacagatgttgtctttctgtctccattttcccagcacccagcgcctcgagtccacagggacggcaatgctgagcgtctgttggatgaacaagtgaacgagattcatgcacgttcttttccttctctgcagagtgcctgagcctgccaggtcttatgctgtggtgggctctggactggagactgggttcaattagtgcctcagcaatgtgactctggttaagccacttaaattccccgagcctcagtttccccatctgtaaagtgggcataatagcacttaccctaatctcaagggtatcaaatgtgataaaaccatataaagtgttcattgcatttattaagtggctgatctgtgttaattactgttagtatcatttaaggctggaggagtgcaccttagttttctcttgttgggacaaggccagttggttgtgtgtgccccttggtttaaccctagggcagaacttctttggtttggggtgcaggcctcaggggtgcagggctgagaggcagaggctgagtcaagcccagggagaaggctggtgtgttgccctggagcaccagtttcctccacagtcagcaatgtcagcctttgaagactattaagacaaatgcagttacattacagaaagcaataaaaatgcttgtgaatttttaaggtaagatacctagattttagccaggtcctgggctggggccccctccttgcagacgttcccttcctttgctgcctctcccatggcccctgcacaaggctgcaggatgggtggggctcaggccttgcagcagtgaatggattgatgaagctgcccttcaaggcacttctcttttccttacacaaatgcttttgcaactcctgtgccctgaggctctgtcttaaactggtgtaggccccagtggcagggctgacacctgacagctaagcctgggaggaaatgcttttgattgttccatgccagaatactccaaccttcacctccctggccttttgtgctggaacaaggccaatcagttctgtctgctccttccagtggtgatttggtttaatcaaacaattgcatgtctgggagagttccctgtccgccttgattatacatgcatcacccttgccccgccttgcacatactccccaagtcacattcatccaatttcatttcattgcagataaaccacacacagaaatagacaatgcaatcaccacagcccgtgtctagaagaacatcttgtccaagcgcaggtgcaattttgcctccacttggccgtgtccttgctaccacctgtgtggtcttgggccctgcgtgggggagcaagagggcctggcctccttcctgtctcatctcactgttcttccacacacagcaggtagcgccctcccagccaccctccccatcaccgtcctctgatttgtgaggtgcctgacagggagccagggaagggctcactccgcaagcacagtctcccaaagtggcagcgtctcagcactttgcagagctggcatgatcgtttccgaaatgtccacccaggctctagggcagggtttcttagcctcggcgctattgacattttgtgcaggatgcttctgtgtcatggggctgtgctgtgcacggtaccccggcctctacccactcgatgccagtagcactccctctccagatatgataaccagaagcatctcttgacaaggctaaatgttccctggaagtcaaaatcgctgccagtggagacccattgagagacaggaaggtgcagacaaggcgtgactgaagagcaggtggtcagcccctgagaggccttgatggagcctatcaaagaccctgctcacctgacccctgacccctccgtgtgagctctgcccaggccttgctctcagccttggggtgctctgcatgcagaacccctcccgcctgcacctctgaggtggctcttcctctgcagggttgcttttggcacaggtggaggctctgactatggggacagggctccccctctgtcatgctcagcgctgtcccgtctaagtctcatcgctcatcaggaacacccaggcccttggctccctttaaagctggtgttgggcctcaatgaatgcctctctcttttggctggaagctccaatattattttcctctttttattggattatctttcttgaggtattcaaatgataagacaaaaaatatgtcaaagcctaggctgtcagctgcagggactggcagtcctccattcaggaggctgagcaggtgagggcttttgattaggaagctatcatgctctgattttttccagaatgatcacttatagatcaagtgaactaatctgtcccaatttgctcatcatgactttaggtctttatctgcatgtctaggctatccctgttcgatttacaaaaccaagaacaagaaaggttgaccttacagcccctatgaggccttgacccagacggccgcctataaaaacggcccactcattatgcggtcacccaaatggctcaaaggtataattggcacatttgactgcatattactcggccctttaaatatctcttctgatgtgttaaaattagcttcttcccaaccacaaaaagggaaaggagtgtcctttttaagcaaatatggggaaaaagctcctctttgtctggcttagttaaaaatgaccccatctaaagtcaagggtatgtactgggtgacctttcaaggcagcacccagacttaagatgtaagaattctcctttttcgattgaaaaaaatagactttcttgacacttcagagccatcatagcacaatgggaaccggagagagggaaggggcggaagggcagagaccccagctgtacaatgcccctgggtctaggcttgagcgaaggtgtgggagtgggagggagaccatgtggctcacggtgcacagaaaggatttgatgtaactcagccctcctctgtcccccaggtgagtatcgtgtgtgctggcttctgtggataggggtacagcacacagggagtctcacctgggtcttcaatatgcttcatctccatttcactgcagacagacccaacctcaacctcaggggttaaacagttgccctgggtcccccagggtgcaacggaaagagcaggaattggaacccaagtctgtctgacccaagggccaagctcgttacagttttctggtactgaggttaagggaaaaatcaatcttgcttgattttcttccctgaccaaataaaagcccccaaagacctagagaattcatctgaggttataaaaataaagtaaaagacagccctttgggaacagtcctggtcttgaacttgagctggtgttattgctggtggaggtgcccacagttttcacttgtggactcaagctccttccctgacagcttgctgcagagagcccttcactgagaggatccaggtgatgcagcctccaaagtaggaatgggcaaggtgtgcacctggaggtgagaggccgctgtcctgggacaccggtggaaggaggtgctgaggaaggtcacaaaagacatgtttatttgacttcattaatatttgaagggtgagctctatgccccaagcagagaaaaaagaagtgaggaactattagcattttttatcatatttaatgggacaaacatctaaggggcagatgtcatagcggttaagaacacggatcttagagttaatcagattgggatcaagtgccaaatttgccagtttctggctgtgagactttggtcaagttactctaccttttcaagcctcagtttatgcatctgtaaagtgaggatgatggtaatcatatccattcactagagtgtgatgcctgatagctagtacacagagcataaaggagagctgggatctgtgcactcacggtcagaggttgtgttgtttcagctccgttctgttccctacttgatgtgtgacttttctttggtccctttgattacctaagcctcagtttcctcatctggaaaaaataaaaacaaaaaaggtcggggcagagggagaatcacttcccagtttggcaaagaaaggtagagatgatggaaaggaaacatttttgtaaactgcaaaatgctgtcaaaatagaagcagagattccagcgagacaggactgatgaatggctgggcattgtcaggcacctcctcgcaggaccctcaaaccattaaggacttgactttgctgtccccagttcttcctctgtctaagacgtgagattcagagatgaaaagtcagggcccactggaaagacgatggagggattcatactggctggaatagcatccaggctctctgttctttgtaatatctgggttatgggtggcatgaagaggaagctgggagaggtggcggcagtgcccaggaagttgacatagagaaggggtgggtggaggaggaggaggggaagagaggatcactttggatatcaggagattgattttggggtttggcaggtgggacatcaggaggatataaggtaattggggaagaaaggaaatttggagaagtgatgctttgggttatgaataggtttcccattaatgtctgtggagagaagcaagaaaagatggtaatttattgctaatcatttttagctgttggaatgtgtgtctttgaatgttattccatgcaaagactgggcactggtgtgcatttgtgcaaattgcaaaggtgttttaaacatcctctgcgaaatgagatatttcatcacggggcagacagtgttttgtagtccacagagtgtttttgaaagtatttttccctttgagtctcttccaagccctctgaaaaagatatggcatgaattattattattattgttattattattttgacagtgcctccctctgtcacccaggctggagtgcagtggcatgatttcggctcactgcaacttccgcctcctgggctcaagcgatcctccacctcagcctcttgagtagctgggactacaggtgcacacgaccatgcccggctaatttttgtatttttagtagagacagggtttcatcatgttggccagggtggtcttgaactcctgacctcaagtaatccacccacctcggcctcccaaaggaaattttataatgtcttcgtcctaagggttcacctttcctgcttgctcttagagtaggattctgaggccttggtcatgcacgttaagcctcagccattcactaactgttaagctttatgattgcctcaatcatttcatttatccatttagggaatgtacataagcactcccctgtgccatgcactgtgttgggcagtggaggtacagcatgcacggtcagacatagtttccagatgaagtaatatgtaaggagattatggaaggatgaacaggaagtagttacgaggacagtcaggaggcaggtggagggaggcatgcaaggcagaagcacccagtatgtcaaagcctggctcagaaaaacacggcaagtttgtggagatcttctcagatgtattgttttgttatcaagtgttcttttgcgtttcatatcttaaactgaatgtaaatggcatacagcccaccgtatctatctgcaataaattgcaaataattacatgttataagtaaaagttaccaagaggccacaagaagttgttttaatttattgttcattttaacccgattttcccaagtgtgtcattgatttttgaatttttaatattttttctggagttcatgttaagacataccagaagccagcaattctgttgttctattttactaaatattagttattttccaaataaattattggcaatgtatgttaacaaatattaagttgacaaagtaacttattgaactatcaccatatttttattcttaataaacttcatcaattacatggtacatatatgccattcaagatcgacattcttttagaatactacagagttatttccactttaaagcagagaaaattgaggcacaggatgattcaatgatttgcccctgtcctcctgccaataaagggtcaaactggaatcagaagtcagcttttctgatggaggctaactcctgtaaaatcgcatgtggagaaaggactcttgtgtttgacagtctaagggccttttctgcctaatctaaggtctgtttccctatatgcaggctgggaggggtgattgtgcagagggacccttggagaactgttacattatgcaaacttgattatcctgtctgacattattgatgtcagcagccattgtgaaatgaagtttgggagatggagtgtggaaggtggcacttgtaatttttaataatcatcctcttttacttcttggggggaggcagtgggggagaaacagagcttcagggttgtggatgctttaatggaatctgtctgtcacaataaggaagtagagaaagtcttttagcgttctacaggctaaatcacagggcttgaaccatggtgtttttggtgaacagagatgccgtaccataaaggcagatggagaatgactgcagggtcaatgagattgtcaccccccgcggcagggacaatgtttattcatctctgaaatcctagtgcccttcacagggcacttagctggagctggtccagtgagagctgattccaaatacactctataaaggaccttgtctgtgtagaattttggcatctcaggcactgtgatgaccactcctcccagttcaaaatctccatatccaactacctgatgaatttctccctttggatcccaaatgaccagaacaggacagataatgtccccttcaagaattttttatcttatgtgaagtccagtgaatggtgttactgtctacccagtcttccaagtaagtgtgacagcttggcatcatttttaaatttccattctcctttgccccacataccagatcattcaccaagcactgcctcttctattttctcatgatctcttgaatttgtccacttccctccatctctaccaacacctccttggaccatgccaacaccatttcttgcatctgcagtttcagcaatctcctaattggtcttcctgccatcaccttcattaatccattctccatgtagtagctggaatgacatctagttaacctttacttaaaacctccatggctcttgaggtcaaagttcaaactcattacatggcctaaggctttttggggtatgatcccaacgaatttctccatctgtctcccatcctgctccctgcctccctatcttcttccagttcctctaatgccacacttccccacacccagcctccactcatgctgtttcttctgccaagaacatccttccctgctcttgcctagccaaatcttgcttattttccatgtctcagtctcagttcttcagtggggacttccctgaataaccgtataagcaaacattaataaagttcttgctatgtgacagatacttgcctttacatagattaacctgttcaatcctcacaataaccctatgacatagataacatacggtctacagttagcagatggagaaactgaggcactaagagataaatgaacttgtccaaggttacatgcaaggtagaagagctgagattcaaatgcaagcgtcttggttccctagtctgtgttttaatcactacaccctgactccagactatgctgagttgtacctgctgtagcctggaattcacttccactgcacccctaatgcttatgcggcattattctcccttctatagttacagcatcacgtggacaggaactgtgtctgtcttgtccacgggtgtgtccgcagtacctgcacaatgcctagcatgtcacaggcactcatgaagatgttttctggttgaatgaataaaagattaaaattctccctaagcatatcagctgttggagccactcttgttcccagtgtgtttcagattcatttgggggcagagagcaaaagtgtctgcatgtggcaggtgagatgcccctatatgaggtgtttggatacagtcgtatgctgaagaagactttacctcttggttggtgtttccctacttccactcccaatatggatggcagccaagctttcattttgcaggtctaagcctctgtgtctagaaaacggaggttttagtgacttgtcttttgcaaaagtaagaattggcagacaccatggcagtgggcgtcctctcttgctgaggacaggaatggggctaggctgcagcatgcctgatgagaagctgctgtgggtggttgggcagttaggcactatttcccatggcctggagagcagc

SEQ ID NO: 155 - DNA, 2505 bp, Homo Sapiens
cttggcaaggctaataagaaagcagcttttccaagaaacaatacaatattactggccagatagtattattgattaattcaacaaacagttatgtagcatctactggtaccctggaactgtgctgaactttatagctacacagatgactaagacgcaatttggccttgccagttcatgactgagttatacatgaacagaacaagatcctcatgaaacctctgatatggacatggtcagatgttgaaggccagaggccggctctgctcatctgcacagctgcagcaggacccacgcagggagttaaggatctcgaggaagtgcctccatctgcagcgagtcagtcagcccaagcacgctgtgctctggggagctggggttatggcaagccctttgagccaagaagtgtgaaaaacatacactctactcctgcttacccagatgccacaatgcacagacaactcctggctccggtggaaggaaggatggcagagacattgaatcagaaactccatgttgccaatgtgctggaagatgaccccggctacctacctcacgtctacagcgaggaaggggagtgtggaggggccccatccctcagctctctggccagcttggaacaggagttgcaacctgatttgctggactctttgggttcaaaagcgactccgtttgaggaaatatattcagagtcaggtgttccttcctaaaaaaaaaagtctattttggagaattgaaataattcatggaagggaatcactattcagggatttttcccctttgctcttcttttccctccttaaaagaaaaattaccttctagtcctaggatgaggacacactattagtttgaattaaatgctttgatattctcagatcagccatcttgaaccaaagcaaaaccacaagttacactttcttaaaatttgatttgtcatattttctagagaaacttgaatttaattgtgttattcttagcttccactggcagcctagctttgagggtaaatgaaaatataacccatagattacccagccacttgggaacagcaggtaatactgaagaaaaataaaaatagattttgaaaacgttacttacatttctatgattatgattctgcttccatttaagggaaaacttaggtaaatagagaaattttttctataacatttgtagtcagtatttgaagtgattttttaaaaaataagtattggtccctgttcactttttgattagataaatagataaaatatgttatcttgagaaaaatgattatgctgaaagctttataaacagtatactctttaaaaaatgaagagctgacataatttaacttgtatgtattatgtaagtaaaagagttaggagcctttgaatgagtaagttctgattagattttatctttaaacaaaaccacaaaatttaattggtttttacttgtccacttactgctagtgtcagtttcaggggaagaaatggtttcttttaaaaatcttaataggggacatatgccctaaaaatagtcagttttctagtctgagtaatagataagagactgactaagcaaagtttaaaatgctatttggacactttaatgcacatattggatatctaaaagtctacagccatataaaaattttatataattaatgagcaaatgccgtctctcatgccctaaaataaatcagtagaaacatgtttgctggtgaatcagtgaagcattatgttaaacagtgagttacagctcagagttaaaactttctccttctttttgaagaagctgtgcaaatacttctttttaaggagatctggccttttcctacctggttacctcagtcttcctctgctttgggaagctgaaaaagaagaaaaatcacatttaaagcactggaatgtctgaatgggacgcttgaatgtgtagaacagctgtactgatcctagcatgactcagaggacagtctagggcattttctgggtaattcaggataaaagtatttttttttttaagaaaaatacatgtttttggacaacaaaacaaagtaaacattagtttattcgattgcctccttatacttgcctctttcattctgtcccctgtagatttttaaaaaattatctcattttaaaactttattatttcattttaaataattgacatataataattgtacatatttagggggtacatagtcatgtttcaatacatttacagtgatcagatcagggtggttaacgtaatcattggctcaaacatttttcatttctttgtattggtacggagcattcaatatccatcccccttctagctatctaaaactatgtattattgttaactataggcaacatatagtggtatagagtgctagaacgtattcctcctaggaataatttgctgtaattttgtatcctttaataaatctctccctatccctctttccccccacccttcccagctgctgtgtcctctgttctaccttctacttccgagataaacttggttttagcttcc

SEQ ID NO: 156 - protein, 165 aa, Homo Sapiens
MKPLIWTWSDVEGQRPALLICTAAAGPTQGVKDLEEVPPSAASQSAQARCALGSWGYGKPFEPRSVKNIHSTPAYPDATMHRQLLAPVEGRMAETLNQKLHVANVLEDDPGYLPHVYSEEGECGGAPSLSSLASLEQELQPDLLDSLGSKATPFEEIYSESGVPS

SEQ ID NO: 157 - DNA, 417 bp, Homo Sapiens
ggcttcccaccgcagactgctacagggaccctaatgctcttcctgtctgacatcaatgacaacgtcccgactctccggccacgttcccgctacatggaggtctgtgagtctgctgtgcatgagcccctccacatcgaggcagaggatccggacctggagccgttctctgacccatttacatttgaattggacaatacctggggaaatgcggaggacacatggaagttggggagaaattgggaaaacggaggttttagtgacttgtcttttgcaaaagtaagaattggcagacaccatggcagtgggcgtcctctcttgctgaggacaggaatggggctaggctgcagcatgcctgatgagaagctgctgtgggtggttgggcagttaggcactatttcccatggcctggagagcagc

SEQ ID NO: 158 - protein, 128 aa, Homo Sapiens
MLFLSDINDNVPTLRPRSRYMEVCESAVHEPLHIEAEDPDLEPFSDPFTFELDNTWGNAEDTWKLGRNWENGGFSDLSFAKVRIGRHHGSGRPLLLRTGMGLGCSMPDEKLLWVVGQLGTISHGLESS

SEQ ID NO: 159 - DNA, 3835 bp, Homo Sapiens
gtttattttgatgttgtggagcgctcaacaggaaaaattgtggatacatccttgattttcaacattaggatcagtgatgtgaatgatcatgcaccccagtttccagagaaggaatttaacatcactgtgcaagaaaaccaatctgcagggcaacctatttttcagatgttagcagtcgatttggatgaagaaaacactccaaattctcaagtcctttacttcctcatttctcaaacaccattactgaaagaaagtggtttccgggttgatcgccttagtggagaaatacgactctctggctgcttagattatgagaccgctcctcagtttacactgctaatcagagccagggactgtggagaaccgtcactgtcatccacgaccaccgttcacgtggatgtgcaagaaggcaacaaccacaggcctgcatttacccaggagaactataaggttcagattcctgaaggccgagccagccagggcgtgttgcgtctcctggttcaagatcgagattctccatttacatcagcttggagagcaaaattcaacatattgcatggcaatgaagaggggcattttgacatttcgactgaccctgagaccaacgaagggatattaaatgttatcaagcctttggattatgagactcgcccagcgcaaagcctcatcattgtcgtggagaatgaggagaggctcgtcttctgtgagagaggaaagcttcagccgccaaggaaggcagcagccagcgccactgtgagtgtgcaggtgacagacgccaacgacccaccagcctttcacccccagagcttcattgtcaataaagaggagggcgccaggcctgggaccctgttgggaacttttaatgccatggatccagacagccagataagatatgaactggttcatgacccagcaaattgggtcagcgtcgacaaaaactccggagtggtcatcaccgtggagccaattgaccgagaatcccctcatgtaaataacagtttttatgtaatcatcattcacgctgttgatgatggcttcccaccgcagactgctacagggaccctaatgctcttcctgtctgacatcaatgacaacgtcccgactctccggccacgttcccgctacatggaggtctgtgagtctgctgtgcatgagcccctccacatcgaggcagaggatccggacctggagccgttctctgacccatttacatttgaattggacaatacctggggaaatgcggaggacacatggaagttggggagaaattggggtcaatcagttgaacttttaaccttgagaagcctgccacgtggtaattacttggtgccactcttcattggagacaaacagggactttcccagaagcaaactgtccatgtaaggatctgcccctgtgccagtgggctcacatgtgtggagcttgcagatgcagaagtggggcttcatgtgggggccctgttccctgtctgtgcagcatttgtggctctggcagtggctctgctttttctgttgcgatgctattttgtgcttgaacctaagaggcatggatgctctgtatccaatgatgaaggccaccaaacactggtcatgtataatgcggagagcaaaggcacttcagcccagacatggtcagatgttgaaggccagaggccggctctgctcatctgcacagctgcagcaggacccacgcagggagttaagggttatggcaagccctttgagccaagaagtgtgaaaaacatacactctactcctgcttacccagatgccacaatgcacagacaactcctggctccggtggaaggaaggatggcagagacattgaatcagaaactccatgttgccaatgtgctggaagatgaccccggctacctacctcacgtctacagcgaggaaggggagtgtggaggggccccatccctcagctctctggccagcttggaacaggagttgcaacctgatttgctggactctttgggttcaaaagcgactccgtttgaggaaatatattcagagtcaggtgttccttcctaaaaaaaaaagtctattttggagaattgaaataattcatggaagggaatcactattcagggatttttcccctttgctcttcttttccctccttaaaagaaaaattaccttctagtcctaggatgaggacacactattagtttgaattaaatgctttgatattctcagatcagccatcttgaaccaaagcaaaaccacaagttacactttcttaaaatttgatttgtcatattttctagagaaacttgaatttaattgtgttattcttagcttccactggcagcctagctttgagggtaaatgaaaatataacccatagattacccagccacttgggaacagcaggtaatactgaagaaaaataaaaatagattttgaaaacgttacttacatttctatgattatgattctgcttccatttaagggaaaacttaggtaaatagagaaattttttctataacatttgtagtcagtatttgaagtgattttttaaaaaataagtattggtccctgttcactttttgattagataaatagataaaatatgttatcttgagaaaaatgattatgctgaaagctttataaacagtatactctttaaaaaatgaagagctgacataatttaacttgtatgtattatgtaagtaaaagagttaggagcctttgaatgagtaagttctgattagattttatctttaaacaaaaccacaaaatttaattggtttttacttgtccacttactgctagtgtcagtttcaggggaagaaatggtttcttttaaaaatcttaataggggacatatgccctaaaaatagtcagttttctagtctgagtaatagataagagactgactaagcaaagtttaaaatgctatttggacactttaatgcacatattggatatctaaaagtctacagccatataaaaattttatataattaatgagcaaatgccgtctctcatgccctaaaataaatcagtagaaacatgtttgctggtgaatcagtgaagcattatgttaaacagtgagttacagctcagagttaaaactttctccttctttttgaagaagctgtgcaaatacttctttttaaggagatctggccttttcctacctggttacctcagtcttcctctgctttgggaagctgaaaaagaagaaaaatcacatttaaagcactggaatgtctgaatgggacgcttgaatgtgtagaacagctgtactgatcctagcatgactcagaggacagtctagggcattttctgggtaattcaggataaaagtatttttttttttaagaaaaatacatgtttttggacaacaaaacaaagtaaacattagtttattcgattgcctccttatacttgcctctttcattctgtcccctgtagatttttaaaaaattatctcattttaaaactttattatttcattttaaataattgacatataataattgtacatatttagggggtacatagtcatgtttcaatacatttacagtgatcagatcagggtggttaacgtaatcattggctcaaacatttttcatttctttgtattggtacggagcattcaatatccatcccccttctagctatctaaaactatgtattattgttaactataggcaacatatagtggtatagagtgctagaacgtattcctcctaggaataatttgctgtaattttgtatcctttaataaatctctccctatccctctttccccccacccttcccagctgctgtgtcctctgttctaccttctacttccgagataaacttggttttagcttcc

SEQ ID NO: 160 - protein, 623 aa, Homo Sapiens
MLAVDLDEENTPNSQVLYFLISQTPLLKESGFRVDRLSGEIRLSGCLDYETAPQFTLLIRARDCGEPSLSSTTTVHVDVQEGNNHRPAFTQENYKVQIPEGRASQGVLRLLVQDRDSPFTSAWRAKFNILHGNEEGHFDISTDPETNEGILNVIKPLDYETRPAQSLIIVVENEERLVFCERGKLQPPRKAAASATVSVQVTDANDPPAFHPQSFIVNKEEGARPGTLLGTFNAMDPDSQIRYELVHDPANWVSVDKNSGVVITVEPIDRESPHVNNSFYVIIIHAVDDGFPPQTATGTLMLFLSDINDNVPTLRPRSRYMEVCESAVHEPLHIEAEDPDLEPFSDPFTFELDNTWGNAEDTWKLGRNWGQSVELLTLRSLPRGNYLVPLFIGDKQGLSQKQTVHVRICPCASGLTCVELADAEVGLHVGALFPVCAAFVALAVALLFLLRCYFVLEPKRHGCSVSNDEGHQTLVMYNAESKGTSAQTWSDVEGQRPALLICTAAAGPTQGVKGYGKPFEPRSVKNIHSTPAYPDATMHRQLLAPVEGRMAETLNQKLHVANVLEDDPGYLPHVYSEEGECGGAPSLSSLASLEQELQPDLLDSLGSKATPFEEIYSESGVPS

SEQ ID NO: 161 - DNA, 2511 bp, Homo Sapiens
gtttattttgatgttgtggagcgctcaacaggaaaaattgtggatacatccttgattttcaacattaggatcagtgatgtgaatgatcatgcaccccagtttccagagaaggaatttaacatcactgtgcaagaaaaccaatctgcagggcaacctatttttcagatgttagcagtcgatttggatgaagaaaacactccaaattctcaagtcctttacttcctcatttctcaaacaccattactgaaagaaagtggtttccgggttgatcgccttagtggagaaatacgactctctggctgcttagattatgagaccgctcctcagtttacactgctaatcagagccagggactgtggagaaccgtcactgtcatccacgaccaccgttcacgtggatgtgcaagaaggcaacaaccacaggcctgcatttacccaggagaactataaggttcagattcctgaaggccgagccagccagggcgtgttgcgtctcctggttcaagatcgagattctccatttacatcagcttggagagcaaaattcaacatattgcatggcaatgaagaggggcattttgacatttcgactgaccctgagaccaacgaagggatattaaatgttatcaagcctttggattatgagactcgcccagcgcaaagcctcatcattgtcgtggagaatgaggagaggctcgtcttctgtgagagaggaaagcttcagccgccaaggaaggcagcagccagcgccactgtgagtgtgcaggtgacagacgccaacgacccaccagcctttcacccccagagcttcattgtcaataaagaggagggcgccaggcctgggaccctgttgggaacttttaatgccatggatccagacagccagataagatatgaactggttcatgacccagcaaattgggtcagcgtcgacaaaaactccggagtggtcatcaccgtggagccaattgaccgagaatcccctcatgtaaataacagtttttatgtaatcatcattcacgctgttgatgatggcttcccaccgcagactgctacagggaccctaatgctcttcctgtctgacatcaatgacaacgtcccgactctccggccacgttcccgctacatggaggtctgtgagtctgctgtgcatgagcccctccacatcgaggcagaggatccggacctggagccgttctctgacccatttacatttgaattggacaatacctggggaaatgcggaggacacatggaagttggggagaaattggggtcaatcagttgaacttttaaccttgagaagcctgccacgtggtaattacttggtgccactcttcattggagacaaacagggactttcccagaagcaaactgtccatgtaaggatctgcccctgtgccagtgggctcacatgtgtggagcttgcagatgcagaagtggggcttcatgtgggggccctgttccctgtctgtgcagcatttgtggctctggcagtggctctgctttttctgttgcgatgctattttgtgcttgaacctaagaggcatggatgctctgtatccaatgatgaaggccaccaaacactggtcatgtataatgcggagagcaaaggcacttcagcccagacatggtcagatgttgaaggccagaggccggctctgctcatctgcacagctgcagcaggacccacgcagggagttaaggcttacccagatgccacaatgcacagacaactcctggctccggtggaaggaaggatggcagagacattgaatcagtctaaagagagaaatcgcttcagcctcagcaggggctgcatcatcccccagggaagagccacagctgggcgaggattgccacaagacatttacaaggagatgatgccacggagactaacgcagactggtaaacggaaacacggggctttggctcgaacaccctctttcaagaaagttgtttatgaccacaaggaagatgaggagaacaaggctgggagaaagcaaaggagccacttgtttaaggttatgcagctgagaaatgaacaaggtggggttcgagtccagagtgcgcattccccatcaccccttaacaaaaaggcatgtttcccaggagactacagaggagaatcggcaggtggtcacaattgcagggctgtctcaggctgagcagagagtacggtggaggggcatgggcctgctgttggcggtgagggccttggaaatggcttcctggaggagatggcaattatccaggtagacaagatgtgtgtgtgtgtgtgtgtgtgtgtgtgtgtgtgtgtgtgatcatgaagaagaaataatgtgcaaagccctggtcataaataacttttcctctgcaaactgtggatggcagttcaccatgtttctcaccactggcctggtcactgcttatccaatatgcatgtaagaattactttttctcttttttcccttctataaattctcatagaacttcctttaatgcattaaaaaagcaactagcatgttcaa

SEQ ID NO: 162 - protein, 666 aa, Homo Sapiens
MLAVDLDEENTPNSQVLYFLISQTPLLKESGFRVDRLSGEIRLSGCLDYETAPQFTLLIRARDCGEPSLSSTTTVHVDVQEGNNHRPAFTQENYKVQIPEGRASQGVLRLLVQDRDSPFTSAWRAKFNILHGNEEGHFDISTDPETNEGILNVIKPLDYETRPAQSLIIVVENEERLVFCERGKLQPPRKAAASATVSVQVTDANDPPAFHPQSFIVNKEEGARPGTLLGTFNAMDPDSQIRYELVHDPANWVSVDKNSGVVITVEPIDRESPHVNNSFYVIIIHAVDDGFPPQTATGTLMLFLSDINDNVPTLRPRSRYMEVCESAVHEPLHIEAEDPDLEPFSDPFTFELDNTWGNAEDTWKLGRNWGQSVELLTLRSLPRGNYLVPLFIGDKQGLSQKQTVHVRICPCASGLTCVELADAEVGLHVGALFPVCAAFVALAVALLFLLRCYFVLEPKRHGCSVSNDEGHQTLVMYNAESKGTSAQTWSDVEGQRPALLICTAAAGPTQGVKAYPDATMHRQLLAPVEGRMAETLNQSKERNRFSLSRGCIIPQGRATAGRGLPQDIYKEMMPRRLTQTGKRKHGALARTPSFKKVVYDHKEDEENKAGRKQRSHLFKVMQLRNEQGGVRVQSAHSPSPLNKKACFPGDYRGESAGGHNCRAVSG

SEQ ID NO: 163 - DNA, 2760 bp, Homo Sapiens
ctacggcgatccaagagaagatgggttatcaccaccttggagctggaggaggaagacccgggaccctttcccaaactcattggtgagctgttcaataatatgtcttataacatgtcactaatgtatctaatcagtggacctggtgtggatgaatatccagagattggtttgttttctctagaagatcatgagaacggaaggatatatgttcaccgccctgtcgatcgagaaatgacaccatctttcacggtttattttgatgttgtggagcgctcaacaggaaaaattgtggatacatccttgattttcaacattaggatcagtgatgtgaatgatcatgcaccccagtttccagagaaggaatttaacatcactgtgcaagaaaaccaatctgcagggcaacctatttttcagatgttagcagtcgatttggatgaagaaaacactccaaattctcaagtcctttacttcctcatttctcaaacaccattactgaaagaaagtggtttccgggttgatcgccttagtggagaaatacgactctctggctgcttagattatgagaccgctcctcagtttacactgctaatcagagccagggactgtggagaaccgtcactgtcatccacgaccaccgttcacgtggatgtgcaagaaggcaacaaccacaggcctgcatttacccaggagaactataaggttcagattcctgaaggccgagccagccagggcgtgttgcgtctcctggttcaagatcgagattctccatttacatcagcttggagagcaaaattcaacatattgcatggcaatgaagaggggcattttgacatttcgactgaccctgagaccaacgaagggatattaaatgttatcaagcctttggattatgagactcgcccagcgcaaagcctcatcattgtcgtggagaatgaggagaggctcgtcttctgtgagagaggaaagcttcagccgccaaggaaggcagcagccagcgccactgtgagtgtgcaggtgacagacgccaacgacccaccagcctttcacccccagagcttcattgtcaataaagaggagggcgccaggcctgggaccctgttgggaacttttaatgccatggatccagacagccagataagatatgaactggttcatgacccagcaaattgggtcagcgtcgacaaaaactccggagtggtcatcaccgtggagccaattgaccgagaatcccctcatgtaaataacagtttttatgtaatcatcattcacgctgttgatgatggcttcccaccgcagactgctacagggaccctaatgctcttcctgtctgacatcaatgacaacgtcccgactctccggccacgttcccgctacatggaggtctgtgagtctgctgtgcatgagcccctccacatcgaggcagaggatccggacctggagccgttctctgacccatttacatttgaattggacaatacctggggaaatgcggaggacacatggaagttggggagaaattggggtcaatcagttgaacttttaaccttgagaagcctgccacgtggtaattacttggtgccactcttcattggagacaaacagggactttcccagaagcaaactgtccatgtaaggatctgcccctgtgccagtgggctcacatgtgtggagcttgcagatgcagaagtggggcttcatgtgggggccctgttccctgtctgtgcagcatttgtggctctggcagtggctctgctttttctgttgcgatgctattttgtgcttgaacctaagaggcatggatgctctgtatccaatgatgaaggccaccaaacactggtcatgtataatgcggagagcaaaggcacttcagcccagacatggtcagatgttgaaggccagaggccggctctgctcatctgcacagctgcagcaggacccacgcagggagttaaggcttacccagatgccacaatgcacagacaactcctggctccggtggaaggaaggatggcagagacattgaatcagtctaaagagagaaatcgcttcagcctcagcaggggctgcatcatcccccagggaagagccacagctgggcgaggattgccacaagacatttacaaggagatgatgccacggagactaacgcagactggtaaacggaaacacggggctttggctcgaacaccctctttcaagaaagttgtttatgaccacaaggaagatgaggagaacaaggctgggagaaagcaaaggagccacttgtttaaggttatgcagctgagaaatgaacaaggtggggttcgagtccagagtgcgcattccccatcaccccttaacaaaaaggcatgtttcccaggagactacagaggagaatcggcaggtggtcacaattgcagggctgtctcaggctgagcagagagtacggtggaggggcatgggcctgctgttggcggtgagggccttggaaatggcttcctggaggagatggcaattatccaggtagacaagatgtgtgtgtgtgtgtgtgtgtgtgtgtgtgtgtgtgtgtgatcatgaagaagaaataatgtgcaaagccctggtcataaataacttttcctctgcaaactgtggatggcagttcaccatgtttctcaccactggcctggtcactgcttatccaatatgcatgtaagaattactttttctcttttttcccttctataaattctcatagaacttcctttaatgcattaaaaaagcaactagcatgttcaa

SEQ ID NO: 164 - protein, 771 aa, Homo Sapiens
MSYNMSLMYLISGPGVDEYPEIGLFSLEDHENGRIYVHRPVDREMTPSFTVYFDVVERSTGKIVDTSLIFNIRISDVNDHAPQFPEKEFNITVQENQSAGQPIFQMLAVDLDEENTPNSQVLYFLISQTPLLKESGFRVDRLSGEIRLSGCLDYETAPQFTLLIRARDCGEPSLSSTTTVHVDVQEGNNHRPAFTQENYKVQIPEGRASQGVLRLLVQDRDSPFTSAWRAKFNILHGNEEGHFDISTDPETNEGILNVIKPLDYETRPAQSLIIVVENEERLVFCERGKLQPPRKAAASATVSVQVTDANDPPAFHPQSFIVNKEEGARPGTLLGTFNAMDPDSQIRYELVHDPANWVSVDKNSGVVITVEPIDRESPHVNNSFYVIIIHAVDDGFPPQTATGTLMLFLSDINDNVPTLRPRSRYMEVCESAVHEPLHIEAEDPDLEPFSDPFTFELDNTWGNAEDTWKLGRNWGQSVELLTLRSLPRGNYLVPLFIGDKQGLSQKQTVHVRICPCASGLTCVELADAEVGLHVGALFPVCAAFVALAVALLFLLRCYFVLEPKRHGCSVSNDEGHQTLVMYNAESKGTSAQTWSDVEGQRPALLICTAAAGPTQGVKAYPDATMHRQLLAPVEGRMAETLNQSKERNRFSLSRGCIIPQGRATAGRGLPQDIYKEMMPRRLTQTGKRKHGALARTPSFKKVVYDHKEDEENKAGRKQRSHLFKVMQLRNEQGGVRVQSAHSPSPLNKKACFPGDYRGESAGGHNCRAVSG

SEQ ID NO: 165 - DNA, 2814 bp, Homo Sapiens
ctacggcgatccaagagaagatgggttatcaccaccttggagctggaggaggaagacccgggaccctttcccaaactcattggtgagctgttcaataatatgtcttataacatgtcactaatgtatctaatcagtggacctggtgtggatgaatatccagagattggtttgttttctctagaagatcatgagaacggaaggatatatgttcaccgccctgtcgatcgagaaatgacaccatctttcacggtttattttgatgttgtggagcgctcaacaggaaaaattgtggatacatccttgattttcaacattaggatcagtgatgtgaatgatcatgcaccccagtttccagagaaggaatttaacatcactgtgcaagaaaaccaatctgcagggcaacctatttttcagatgttagcagtcgatttggatgaagaaaacactccaaattctcaagtcctttacttcctcatttctcaaacaccattactgaaagaaagtggtttccgggttgatcgccttagtggagaaatacgactctctggctgcttagattatgagaccgctcctcagtttacactgctaatcagagccagggactgtggagaaccgtcactgtcatccacgaccaccgttcacgtggatgtgcaagaaggcaacaaccacaggcctgcatttacccaggagaactataaggttcagattcctgaaggccgagccagccagggcgtgttgcgtctcctggttcaagatcgagattctccatttacatcagcttggagagcaaaattcaacatattgcatggcaatgaagaggggcattttgacatttcgactgaccctgagaccaacgaagggatattaaatgttatcaagcctttggattatgagactcgcccagcgcaaagcctcatcattgtcgtggagaatgaggagaggctcgtcttctgtgagagaggaaagcttcagccgccaaggaaggcagcagccagcgccactgtgagtgtgcaggtgacagacgccaacgacccaccagcctttcacccccagagcttcattgtcaataaagaggagggcgccaggcctgggaccctgttgggaacttttaatgccatggatccagacagccagataagatatgaactggttcatgacccagcaaattgggtcagcgtcgacaaaaactccggagtggtcatcaccgtggagccaattgaccgagaatcccctcatgtaaataacagtttttatgtaatcatcattcacgctgttgatgatggcttcccaccgcagactgctacagggaccctaatgctcttcctgtctgacatcaatgacaacgtcccgactctccggccacgttcccgctacatggaggtctgtgagtctgctgtgcatgagcccctccacatcgaggcagaggatccggacctggagccgttctctgacccatttacatttgaattggacaatacctggggaaatgcggaggacacatggaagttggggagaaattggggtcaatcagttgaacttttaaccttgagaagcctgccacgtggtaattacttggtgccactcttcattggagacaaacagggactttcccagaagcaaactgtccatgtaaggatctgcccctgtgccagtgggctcacatgtgtggagcttgcagatgcagaagtggggcttcatgtgggggccctgttccctgtctgtgcagcatttgtggctctggcagtggctctgctttttctgttgcgatgctattttgtgcttgaacctaagaggcatggatgctctgtatccaatgatgaaggccaccaaacactggtcatgtataatgcggagagcaaaggcacttcagcccagacatggtcagatgttgaaggccagaggccggctctgctcatctgcacagctgcagcaggacccacgcagggagttaagggttatggcaagccctttgagccaagaagtgtgaaaaacatacactctactcctgcttacccagatgccacaatgcacagacaactcctggctccggtggaaggaaggatggcagagacattgaatcagtctaaagagagaaatcgcttcagcctcagcaggggctgcatcatcccccagggaagagccacagctgggcgaggattgccacaagacatttacaaggagatgatgccacggagactaacgcagactggtaaacggaaacacggggctttggctcgaacaccctctttcaagaaagttgtttatgaccacaaggaagatgaggagaacaaggctgggagaaagcaaaggagccacttgtttaaggttatgcagctgagaaatgaacaaggtggggttcgagtccagagtgcgcattccccatcaccccttaacaaaaaggcatgtttcccaggagactacagaggagaatcggcaggtggtcacaattgcagggctgtctcaggctgagcagagagtacggtggaggggcatgggcctgctgttggcggtgagggccttggaaatggcttcctggaggagatggcaattatccaggtagacaagatgtgtgtgtgtgtgtgtgtgtgtgtgtgtgtgtgtgtgtgatcatgaagaagaaataatgtgcaaagccctggtcataaataacttttcctctgcaaactgtggatggcagttcaccatgtttctcaccactggcctggtcactgcttatccaatatgcatgtaagaattactttttctcttttttcccttctataaattctcatagaacttcctttaatgcattaaaaaagcaactagcatgttcaa

SEQ ID NO: 166 - protein, 789 aa, Homo Sapiens
MSYNMSLMYLISGPGVDEYPEIGLFSLEDHENGRIYVHRPVDREMTPSFTVYFDVVERSTGKIVDTSLIFNIRISDVNDHAPQFPEKEFNITVQENQSAGQPIFQMLAVDLDEENTPNSQVLYFLISQTPLLKESGFRVDRLSGEIRLSGCLDYETAPQFTLLIRARDCGEPSLSSTTTVHVDVQEGNNHRPAFTQENYKVQIPEGRASQGVLRLLVQDRDSPFTSAWRAKFNILHGNEEGHFDISTDPETNEGILNVIKPLDYETRPAQSLIIVVENEERLVFCERGKLQPPRKAAASATVSVQVTDANDPPAFHPQSFIVNKEEGARPGTLLGTFNAMDPDSQIRYELVHDPANWVSVDKNSGVVITVEPIDRESPHVNNSFYVIIIHAVDDGFPPQTATGTLMLFLSDINDNVPTLRPRSRYMEVCESAVHEPLHIEAEDPDLEPFSDPFTFELDNTWGNAEDTWKLGRNWGQSVELLTLRSLPRGNYLVPLFIGDKQGLSQKQTVHVRICPCASGLTCVELADAEVGLHVGALFPVCAAFVALAVALLFLLRCYFVLEPKRHGCSVSNDEGHQTLVMYNAESKGTSAQTWSDVEGQRPALLICTAAAGPTQGVKGYGKPFEPRSVKNIHSTPAYPDATMHRQLLAPVEGRMAETLNQSKERNRFSLSRGCIIPQGRATAGRGLPQDIYKEMMPRRLTQTGKRKHGALARTPSFKKVVYDHKEDEENKAGRKQRSHLFKVMQLRNEQGGVRVQSAHSPSPLNKKACFPGDYRGESAGGHNCRAVSG

SEQ ID NO: 167 - DNA, 13938 bp, Mus Musculus
ctttgtctgagttgaagtgaagttgtagagattttcagactggagtcagcaatcaccggtgtttagtctgcagcggagcagagaaaaggaaaggggggaaaatcaagaatcgcccgggaaacacagactgcagactccgccagcaccctgcaatagatggggacggagtccacgcggggagccaggccgaggtgacacgctgctcccagccaggaggaccagcggccacccctaccaggaagggacttcacgctcctatctggaagtcgccaaacggtgtgtatgaaaactgaagtttgcgagctgtttaattgctgtgtgattaagagtcgctttcaagactctgagacccgatgtggcttagagctctgagtggctgggaggaagttgaagggattgctgggctcttctaactcgccctgagaagggaatctagcaactgaccaatgcaccaaatgaatactaaaatgcactttagatttgcacttgcacttctgatggcgtttttcagccacgatgtcctggctaagaatctgaaatacaggatttatgaggagcagagggtcggatcggtaattgctagactatcagaagatgtggctgatgttttattgaagctaccaaatccttctgctgttcgttttcgagccatgccacgggggaattctcctctcctggtcgtaaatgagaataccggagaaatcagcataggggctaaaattgaccgcgagcaactatgccaaaaaaacttgaactgttcgatagagtttgatgtgctcactctgccgaccgagcatctgcagctgttccacattgaagtggacgtgctggacattaatgacaattccccccaattctcgagacccgtcattcccattgagatatcggagagcgcagcagttgggactcgtatccccctggacagtgcgttcgacccagatgttggggaaaattccctccacacctactcgctctctgctaatgattattttaatatcgaagtgcgaaccaggacagacggggccaagtacgctgaactcatagtggtgaaagagttggatcgggagctgaaggctagctacgagcttcagctcacggcctccgacatgggagtgcctcagaggtctggctcctccatcctgaaaatcagcatttcggattccaacgacaacagcccggcctttgagcagccttcttacacaatacaactcttagaaaactccccagttggaaccttgctccttgatctaaatgccaccgatccagatgagggcgctaatgggagaattgtgtattctttcagcagtcatgtgtctcccaaaattatagagacttttaagatcgactcagaaaaaggccacttgactcttttcaagccagtggattatgaaatcaccaagtcctatgagatagacgttcaagcccaagatttgggtcccaattccattcctgctcattgcaaaattataattaaggttgtggatgtcaatgacaataaacctgaaattagcataaatctcatgtcccctggaaaagaagaagtatcttatgtctttgaaggggatcccattgatacattcgttgctatcgtcagggttcaagacaaggattctgggctgaatggggaaataatctgtaagcttcatgggcatggacattttaaacttcagaagacatatgaaaataactacttgatcttgaccaatgccactctggatagagaaaagagatctgagtatagtttgactgtgattgctgaggacaagggaacaccaagcctctcctcagtgagacattttactgttcaaatcaatgacataaatgacaatccacctcgcttccagaggagccgatatgaatttgtcatctcagagaataattcaccaggggcgtatatcaccacagttacagccactgatccagatcttggtgaaaacggacatgtgacatacaccattttggagagttttgtcttgggaagttccatcaccacgtatgtaaccattgacccctctaatggcgccatctatgccctcaggatctttgatcatgaagaagtgagtcagatcacttttgtggtggaagccagggatggagggagtcagaagcaactctccagcaacaccaccgttgtgctgaccatcattgatgagaatgacaatgtccctgtggttatagggcctgcaatgcacaataatactgcagaaatatccatccccaaaggagctgaaagtggttttcatgtcacaagaataagggtggtcgacagggactctggtgccaatgctgaattcagctgctccatagtatctggtaatgaggaaaacatctttatcatggaccctaggtcatgtgacattcataccaacgtcagcatggaatccattccctctgcggaatgggcactctcagttatcatccaggacaagggcagtcctcctctgcacaccaaagtccttctgaggtgcatggtctttgactatgcagaatctgtgacaagcacagccatgacctctgtcagccgcgcatccttggatgtgtccatgatcataattatttccttgggagcaatttgtgctgtgttgctggttattatggtcctgtttgcaacgaggtgtaatagagaaaagaaagacaccagatcctacaactgcagggtggcagaatccacgtaccagcatcatcctaaaaggccatccaggcagattcacaaaggagacatcacactggtacccaccatcaatggcactctgcccatcagatctcaccacagatcctccccatcttcatccccaaccttggagaggggacaaatgggcagccgccagagtcacaacagtcaccagtcactcaacagtttggtgaccatctcatcaaaccacgtgccagagaatttttcattagaactcacccacgccactcctgctgttgaggtaagatcagacactacagggcctggtcaagccagatgctgatgctcagaggctgcacagtcatcacacctttaaggttgtcgttgatagatgacagtaggcagttccactagaactcaagccacagggtggacctatctcaagtacaccgtctggcttatttctatttttataaataattcacttgtgggtgttaggtgtgatgtctcacacggggctgttaatcagagtccctgcacttctcagagtaagatgctgagacaggaaaaaataaaacctaaagggacccagctattctcattgttaaaatttctcctgagaaatcaacaccctggctcttgagaatctcactccaattgcatgctgtctttggaaaactttgtgcagttttctggctttctggcattgtctcattatctgaactaacagtgtattttactgagtttttattttattttatttatttatttttacagttttatctaaactgtaaaggaaggcagttatttaaaagtctttcaagcaggaacaactcacttgtgttttgagagcagccagatctctctgtaatggatcttaactgggtttggtgtctggctgtgccctcttcatggtctagcataagtaaacccctgacagatagaaagtgtgagcttagcattcccttttcttccttaatgcacgtgaatgcgtgaggagtgtttttttctgtttcccccagaagtcagttctgtctctttggtttccagcaggtctcgcagcttctctccatgcttcaccaggggcaatatcagccacggccaagttttcgaggaaacaaatattccaggagctataggtatgaattaccctggtgtcagctgctaagtctcggggaacttaaatgccgaagagtaaaaaactgtgtgtttctttcactgatctttctagatatgcccttcaagacatggataaatttagcctgaaagacagtggccgtggagatagcgaagcaggagatagtgattatgatttggggcgcgattctccgatagacaggctcctgggagaaggattcagtgacctcttcctcacggacgggagaattccagcaggtaagagggccgtgatagctaaatctttattttcacagctaccacagagccaggatgacgaacagcttctcccatgcttctgtttctgctgtccttttcctttacactggaaataggtgggatctctgcactattagcagtggacaagcgtgagacatttaatttttttttttcttctcaaaatccacaataagcagttggtagagaaggaatgaatgtgaaggcttaataggagaaggaaggggagagagcactgaaagaagaccaagccccgcccccctccctctttcttatccagccagtgccattgggcgctcctaagcaactccagaaaattgctaggtgcctgtttgtattcagacagcctgttcggtggatagtggtgaactggactataatttggaggatgcatttcctgtgatgggaaccaactcacaaaatcaagagcctaaaatacactggaaagggtatattttaagcactaaaaataggcaaaggaatgtacctttggaggtggtgtgcagagcgtatttcatgccccctctcattttgagtcggtacagcaatagaggagggaaacacacccagagggggatttataaagcacacagccaggtggaggaaattctattaagtttcgaatcaattttttccttagtgactcttgcctctaattgtgccctaggaacttggatccaactgagcaaatgctgagaagatcagtagctgccctgttgctaggggctgtagaaagaaatcaacacttaggagtactgaagtttgcctctgactgtccacacgtcttaattcactgattgtcaacccaatgactgccattcgcaatacacgtaggaaaaaggaacaaaactttactagtgtctgtatttatttatttatttacttgtaaagatgaagaaactaggatagaaaacatgagagaattaaccagaaattaatttggggaaattcagaaaataggattttagctctcatgagttataggaatcacagtagcactagctaactagcagaggttcttactagcagtgccctggggtatcctctgggctaagactgagtactctgggttcatatggagtcaggctttgccatgttatttatggtgctggctgttggcttaacatacatttcagtgactaagctcttacagtttaaagctcattgggcttagttatcctggtgttggtgacattagtgttcttatgtgttttgagatttgaaaattggaagcttatatagattataacaatgtaaaccaggcaggtaggctgtgcctggtcgcaatgaggcagtgagatccgacccaatttccccacccttaatcattcatctaggacatatataaagtaactagtgttttgcttttttaaaaaatctagcttgtttgtcccctgacctgtttccttccctgcacatgtgcatatatgtttgccttagtgtgctcatggtggggctgagaaagtaatggctgtcttcctctattttctttgccttgttgccttgagagagaatgtcttcatccaaagctcgtggatacagctagctagctggccagcaagctttcagtgtgcctgtctctgcccagagaggcacaggcagccatatcatgcttgtaatgggtgctggagaataatcctcggatcctcataccctcacccactgaaccgacaccctagatacttatttgcttttatgtttgaagacatacccacctctttgaaaccactagatgttgcttgtttagttatatgattacaagaccagatagtttatctctggctagacaaatgtataggaaggatatctagtcgcaatgaagcctactagctgcatagcagcctgtatttctacagtcacccatggaatctatccttttcaatgtgtaggtcagaccagttggaagacaaatctatgaaatagctaaaggaacatgtatgccccaagacatcgtgctcaatgacaatgagttttattattctggcttatataatgaagcagctggttgaatttctatggttctgagatatgatgctgacaggggcctacactagaatagcagaatttcccagattaggttatttcataaacaaagacacatgggcatgtcatcaatatttcggtagacattttaaaaatgcacagggttcatttgttggaattttaatttatcatagcaataaaatggagaatacaaatacacagttctaaaatcccatttgtggatctacacatctgagattttttaagctccaaaataatataatttaaatggttaacattagtgtattattttatgtacttatgcattcattcattcattcattcattcacttattccttaattacagtcctgggaattgaactcacagcacaacacaaatcaaaactttgctttgcatctttgcaatgcgtctcatctctctctttttccttttgaagattaaaagcagttattttccatcttccctatatttccaaagttaccatatttccatatattccttgtagcagaattatctagtacttgaattaaacaataatcagtactaatagtaataaatattagacaataaagaggtaggcaaagttaaactatagaaaatagtgaatcctgcctactatgtgtctttacctttatcaatattacattgttgtttaaaattatagacttcatgtgtgtgtgtgtgtgtgtgtgtgtgtgtgcgcgcgcgcgtgcacgcatgcacgcatacatgagctcagatgtctgtgtttccaactaactatgtcataggagctgtatttctacctctgttgctttctacttctacatagggttgaaccattttcaagtttcggagcagtggggcatgagcagtggttggtgatgataccattatgttagtgttttgctagcaaggactgccatgcatactgagcatctacagagataaccatcttttaatcaagagcatcactgtgatgacgccacgtcgatatcctagatttatcttcattctagcaactcctgcaggcgtgctagggtgtaaaacttgtggtctgcaaaagtttcctactcaggaaatactacgagcagagaaaaatgtcggtccacatctgaatcttattaacagagctcagcacaattttctaaagtatgtgtatttttaggacgtaagtgttgtgttccaactgttttttctgcattgatttgtgaacaaatatagatcctgttgcattgcatggcttgccaaaagggtcatttctggtcattcatccttctaattcccacacaaatgtagggttttgtgttttgggttttttttcctgctaaacaaacatgcatttttatctgttgattcatgtttgtcagctcttttttttcttcccaactttgaactccaacactaaacacgggtgtataacgcctccatgtttccagtgaaagttgttgacaatagaaggtttgtaaaagctcccccacctagacttcctctaccttccctgattgtccctgtttcacttttcagcatctttcatctgtgagggcttcaaatactcattattcattctgctctctgttctcagtaggagtcttagctggttcccctccttcctctagtggctcatttcctgtagcaactggcaggctcctattccagttcttgtggccactcctactttcaaatctttacttcatacagttttcacaaccttttcagggcgctttaacattcttttttttttttttaactcaaagtcaatctctgactctcgttgctcagcaacactgagcacatctattatctttgtattcaaagtccactgaaatgcgctctcagcctgttctcagttttgccagttttgaatcctttgcatcagacagagaggcttctcttcctccagcatgccaatgctttgtgcacactgccctttctccatggcaaatgcctcttcttcaattcctgtgcccaattctgcttacctgctgtcttttgaaatagcagtcctcatatccatttctcttcctttctgaacatttcctgagcatcatctcatttgctcctttacctgggtgactcaaatagcatttgttatatttggcttagaactagattgcagtcccattgacagccaggcactgaaatggcccctatttgatgggctcttcaaggataacttactagttactccataggtaatgacttgtttcaagctctatcttgtactcactgcactgccttctatcctacttgtaaggtacaggacagtaataaagtttacagaggagctacaatttctacctgtcctgatcgccacaaaaactatcacctgacagggcttttagatagtcccaagaagagcagaagcaataggtactgctcagcttttcttgatccttgtatatgggatgaaacattttcagcactgaaacacacatacactgtcacgcaaccaaatctcagtggataggagtgagattagaacacccatagcaatgagtgtactttcttctgtttctctcctggtcctttttatttcatcaccccctccccttttgtcttcactgtctctatctacctagtgtttgctatcctttctattaatctcctctctatctttctttttcaattttcatgagtttgtgcatcgtgtccatgtgtgtctacgtatgtttgcatgtatgtgggtatttgtatgtagtgtgtacctgtcttagtgagggttttgctgttgggaacagtcaccaataccaacataacacttataaggaggactacatttaattggggctggcttataggttcagaggttcagtccattatcatcaaggagggaacatggcagtgtctatgcaggcataatgcagaggagctgagagttctagatgttcatctgaaggctgctagcagaatagttgcttccaggccactagaactagggtattaaaacccacacccacagtgacacacctactccaacaaggccacatctccaaatagtgccactctctgggccgagcatatacaaaccatcacattccactctctggcttgctcagcttgctttcttatagaactcaggactaccagcccagggatagctccacccacaataggcctctcacccttgatgactgagaaaatgccttacagttggatctcatggagggatttcctcaagggaggcttcttgctctgtgaggactctacctgtgtcaagttgacacacaaaaccagccagtacactacccatgcatgtagaatcctgtaataatgcctgcaatcatcctcaatagctcttctatcccattcaatgaggcagaatcttacaagaaacccagagcttctgatgtaagtactctagttggccagtgtgttcttgggacaccttgtctctactacccaaggctggggtgacaggtgagccaccacattcccctggcatgttcatcaattctgaggatcctaaatccagcccttatacttgtccagcaagtgctctagccactgagcatgtttcttgctctcctttacgtttttaagttgattaattataattaatatgtgtgtgtgtgtgtgtgtttgtgtggttctgtgtgtgtgtgtatatatgtgtatatatatatcaccatatacatatatggtgttataaatgcctttcactatttaacaaccactcctaagatgttggtgttagtcatgtgggccatgctgttctattatcctgctgcttacatgctcagtgcattcaggttatgagaaaagatgcatatggtcaagattcgtagaatcccgggtaatgttttcatcctcattataggaaatcgaagccaagtaagacaatacaaaaagatgttcttcctaagcctaaagccacagagctgagggccagaacaacaatgccaggtctgttctcctttctcccatcaggatggaggcagtcaatatccacaggcctcatttccatgatcagaggctcagaggtcaaagcaggggtgtggggtgtggatatcgccactgtgataattctctactgagaaccctaggtgctgtttttaaggtataccagttgctcttcaataccctttgctgttttctccactggacgagttaaaacaggcttggcaaatatttccatacagtgtaattaatacctgaaggatgatcatctaaacctgagttttatcgaaatcactctgtttattcagatgactctctcaccacagcataatgacacagtcagccctcgaagaacagaggtccctgcctggatgctcttacacgtcccctggtgttttcgtatgcttttgaatttctagattcttatacttgaaacccttctcttatagcacttagtctcagttttttattttgttttattttgcctgtttttctttccatattttttccttttaaactaagaatggaggtcctgagggagctaaagaccaaaattagcatagaggtcagagataaagaatagtgacttccacacagttaaaaatcatttatccttttctgcttactctcatccagaactacagtgcccatatgctctgtgcagttcctttaccagactgtgggcatagtacacatagtaggtggtttgtttcccctagcaacgagtgtggcatggcataacttcagcagtgacaaagctggaaatctgctctcagcagctgcatctacaaactcagtgcccaacatatatgcctgtgcttagcatcagtcctgatttcttttagatacaaagatactttacattttctataattctgtccttggtcttaaaatgaaatggtattgaaaagtccaagttttctctgaaggaagtggttgtcatatggaatacatttcatatctttgcatatcaatttttaatgtgttttagcaactctatatactgaatttaggatccccttcttttatttttctgctttgctcagttgtagtggtttctatgagtttggccactcacattccactagggaactggaacatatgggaaaatcaaagaaagtacttttcatattcttcagcttccaatgactttttcatgcaattgaatattaatgtatttagaccctaaataagtattttatagcaggacaattcaggatacctaaggtactgattcagagcacttagaattgctatttgaatagaccagtgagtaatggatacaaaccgtaaggaagacaagatacccccaggatggggtggtacccaagggagttccccttctctgaggagaagggatagggggtagtgcaggtggggcttttaagggtgggactgggaagaggggatggagggggtctgtgagtgggatgtaaagtgttttttaaaaagagagagggggagcgagagagagagagagagagagaggaaggaaggaaggaaggaaggaaggaaggaaggaaggaaggaaggaaaagagaatgataaggacactaaccagagaactgacgttttcagtgcaggccaagtccttattttcaagacagcaaaaaatactttacagagattgcctggtattattctaaattgaagagctcgccctcagctctatttccagctgttgctgttgtacagtttatgttcatcttttgttggattacctaagccttagctttgtttggacatgttcacatataaataatgaactccgtattatatttctgaaatttactgttgaccactaaaaatgattattcgctttcttttattaaacggaagactataacacaaacatgacatctggtccagagagccaacatacaactgaaacatataaccgtagcctatctaatgttcctaacaacagattaacattatgattctagcacaaaacctctttctaccttaagaataagatgacatttcccattgctatggatgatgccttgtttaataacggactctccttgctttgtttgttctcagcaatgaggctatgtacggaggagtgcagagtcctgggccactctgaccagtgctggatgcccccgctgccctcgccatcctctgactacagaagcaacatgttcatccccggagaagaattcccagctcaacctcagcaacagcattctcatcagggccttgatgatgacagccagcctgcagaaaacggggagaaaaaaaagagcttctccacttttgggaaggactcccctagcgacgaggattcgggagactctagcacatcatctctgctatcagaaatgagcagtgtgttccagcgccttctccccgcatccctagataccttttctgaatgcaacgaaggggatcgctccaactctctggaacgtcgaaagggtccggcacagggcaaaactgggggttacccacaaggggttgcggcctgggcagccagcacacattttcagaaccccaccaacagctctgggacccctctggggactcactctagtgtgcagccttcctccaagtggctgccagctatggaggagattcctgaaaattacgaggaagatgattttgacaatgtgcttaaccatctcagtgatgggaaacacgaactcatggatgccagcgagctggtggctgagatcaacaaactgcttcaagacgtccgccagagctaggcgactttagctgggccgttgtggttccatgcgtgtggaattaggggacaggggaaaccccgaggaaaaaaactggcgttgccaaatagttgcatttatcataaatgtgtctgtgtatattgaatattaaatactgtattttcgtatgtacacgatgcaagtgtgattattttaatctgtattttaaaaatacatttgtaccttatatttatgtgtaatttaacagacaaattttatttttttactcccatgaccaacatgtttttcctaatcatgcagaaattagccactgtttgaatctatatccttttcaaccaaagttactgcttagcatagttaagtaggggcagaattattaagctgtataaacaacaccactaatgcattgtgtaattcttagtttcattaaacgaggctacttccttttcaatctttacaaaaaaaaatatattaagcattgttagaaacattaaacaatctttcgattactattttcactgctctctgttaactatgatagatcacttcttaaggcaaaatggaggacggaagtagacctattttgtacctagaagcatcccgaggtgttcccgggaaggcagtggtacgcgaattcttcatggtagtgatgctctagtccatgttgcctcgcagtggctcccgtactttttggtgcacggcactggcttgatcatgagaatactttttttttttccagtcgcaaaatatctacttataaacgaaactaaacggtgaatctgatttgatccttgccctatgaaataaaatccaatgatgtggaatctgtaatctaaatgaataacattaagtcccctaccagcacggagtgttgatagacagagacagatatgtcagtgctctgcccctccggggtagtaaacataatggatgtatctggaactctgtgtgcacctccccctcttctctcatcatacttgaacatttgtatcgactgcattgtctctcttttttttttttggctataattattcccctttagcttttgtctcttgtgcatgctatcacagttttgcttgtatttttagcatatgaacatttataaagtcacttttttttgttactgcaattttgtctgatttatcctgtgacaaatgcgaactttatttattgtgctgttatctcctatgtggaatgccttggtaagtgagatctttactatgactattatcatttatgtccacgcttctatgaatgttatttctattaatacactatcttgattgtactgttcagaaaaatttactgtcagtga

SEQ ID NO: 168 - DNA, 5145 bp, Mus Musculus
ctttgtctgagttgaagtgaagttgtagagattttcagactggagtcagcaatcaccggtgtttagtctgcagcggagcagagaaaaggaaaggggggaaaatcaagaatcgcccgggaaacacagactgcagactccgccagcaccctgcaatagatggggacggagtccacgcggggagccaggccgaggtgacacgctgctcccagccaggaggaccagcggccacccctaccaggaagggacttcacgctcctatctggaagtcgccaaacggtgtgtatgaaaactgaagtttgcgagctgtttaattgctgtgtgattaagagtcgctttcaagactctgagacccgatgtggcttagagctctgagtggctgggaggaagttgaagggattgctgggctcttctaactcgccctgagaagggaatctagcaactgaccaatgcaccaaatgaatactaaaatgcactttagatttgcacttgcacttctgatggcgtttttcagccacgatgtcctggctaagaatctgaaatacaggatttatgaggagcagagggtcggatcggtaattgctagactatcagaagatgtggctgatgttttattgaagctaccaaatccttctgctgttcgttttcgagccatgccacgggggaattctcctctcctggtcgtaaatgagaataccggagaaatcagcataggggctaaaattgaccgcgagcaactatgccaaaaaaacttgaactgttcgatagagtttgatgtgctcactctgccgaccgagcatctgcagctgttccacattgaagtggacgtgctggacattaatgacaattccccccaattctcgagacccgtcattcccattgagatatcggagagcgcagcagttgggactcgtatccccctggacagtgcgttcgacccagatgttggggaaaattccctccacacctactcgctctctgctaatgattattttaatatcgaagtgcgaaccaggacagacggggccaagtacgctgaactcatagtggtgaaagagttggatcgggagctgaaggctagctacgagcttcagctcacggcctccgacatgggagtgcctcagaggtctggctcctccatcctgaaaatcagcatttcggattccaacgacaacagcccggcctttgagcagccttcttacacaatacaactcttagaaaactccccagttggaaccttgctccttgatctaaatgccaccgatccagatgagggcgctaatgggagaattgtgtattctttcagcagtcatgtgtctcccaaaattatagagacttttaagatcgactcagaaaaaggccacttgactcttttcaagccagtggattatgaaatcaccaagtcctatgagatagacgttcaagcccaagatttgggtcccaattccattcctgctcattgcaaaattataattaaggttgtggatgtcaatgacaataaacctgaaattagcataaatctcatgtcccctggaaaagaagaagtatcttatgtctttgaaggggatcccattgatacattcgttgctatcgtcagggttcaagacaaggattctgggctgaatggggaaataatctgtaagcttcatgggcatggacattttaaacttcagaagacatatgaaaataactacttgatcttgaccaatgccactctggatagagaaaagagatctgagtatagtttgactgtgattgctgaggacaagggaacaccaagcctctcctcagtgagacattttactgttcaaatcaatgacataaatgacaatccacctcgcttccagaggagccgatatgaatttgtcatctcagagaataattcaccaggggcgtatatcaccacagttacagccactgatccagatcttggtgaaaacggacatgtgacatacaccattttggagagttttgtcttgggaagttccatcaccacgtatgtaaccattgacccctctaatggcgccatctatgccctcaggatctttgatcatgaagaagtgagtcagatcacttttgtggtggaagccagggatggagggagtcagaagcaactctccagcaacaccaccgttgtgctgaccatcattgatgagaatgacaatgtccctgtggttatagggcctgcaatgcacaataatactgcagaaatatccatccccaaaggagctgaaagtggttttcatgtcacaagaataagggtggtcgacagggactctggtgccaatgctgaattcagctgctccatagtatctggtaatgaggaaaacatctttatcatggaccctaggtcatgtgacattcataccaacgtcagcatggaatccattccctctgcggaatgggcactctcagttatcatccaggacaagggcagtcctcctctgcacaccaaagtccttctgaggtgcatggtctttgactatgcagaatctgtgacaagcacagccatgacctctgtcagccgcgcatccttggatgtgtccatgatcataattatttccttgggagcaatttgtgctgtgttgctggttattatggtcctgtttgcaacgaggtgtaatagagaaaagaaagacaccagatcctacaactgcagggtggcagaatccacgtaccagcatcatcctaaaaggccatccaggcagattcacaaaggagacatcacactggtacccaccatcaatggcactctgcccatcagatctcaccacagatcctccccatcttcatccccaaccttggagaggggacaaatgggcagccgccagagtcacaacagtcaccagtcactcaacagtttggtgaccatctcatcaaaccacgtgccagagaatttttcattagaactcacccacgccactcctgctgttgaggtctcgcagcttctctccatgcttcaccaggggcaatatcagccacggccaagttttcgaggaaacaaatattccaggagctatagatatgcccttcaagacatggataaatttagcctgaaagacagtggccgtggagatagcgaagcaggagatagtgattatgatttggggcgcgattctccgatagacaggctcctgggagaaggattcagtgacctcttcctcacggacgggagaattccagcagcaatgaggctatgtacggaggagtgcagagtcctgggccactctgaccagtgctggatgcccccgctgccctcgccatcctctgactacagaagcaacatgttcatccccggagaagaattcccagctcaacctcagcaacagcattctcatcagggccttgatgatgacagccagcctgcagaaaacggggagaaaaaaaagagcttctccacttttgggaaggactcccctagcgacgaggattcgggagactctagcacatcatctctgctatcagaaatgagcagtgtgttccagcgccttctccccgcatccctagataccttttctgaatgcaacgaaggggatcgctccaactctctggaacgtcgaaagggtccggcacagggcaaaactgggggttacccacaaggggttgcggcctgggcagccagcacacattttcagaaccccaccaacagctctgggacccctctggggactcactctagtgtgcagccttcctccaagtggctgccagctatggaggagattcctgaaaattacgaggaagatgattttgacaatgtgcttaaccatctcagtgatgggaaacacgaactcatggatgccagcgagctggtggctgagatcaacaaactgcttcaagacgtccgccagagctaggcgactttagctgggccgttgtggttccatgcgtgtggaattaggggacaggggaaaccccgaggaaaaaaactggcgttgccaaatagttgcatttatcataaatgtgtctgtgtatattgaatattaaatactgtattttcgtatgtacacgatgcaagtgtgattattttaatctgtattttaaaaatacatttgtaccttatatttatgtgtaatttaacagacaaattttatttttttactcccatgaccaacatgtttttcctaatcatgcagaaattagccactgtttgaatctatatccttttcaaccaaagttactgcttagcatagttaagtaggggcagaattattaagctgtataaacaacaccactaatgcattgtgtaattcttagtttcattaaacgaggctacttccttttcaatctttacaaaaaaaaatatattaagcattgttagaaacattaaacaatctttcgattactattttcactgctctctgttaactatgatagatcacttcttaaggcaaaatggaggacggaagtagacctattttgtacctagaagcatcccgaggtgttcccgggaaggcagtggtacgcgaattcttcatggtagtgatgctctagtccatgttgcctcgcagtggctcccgtactttttggtgcacggcactggcttgatcatgagaatactttttttttttccagtcgcaaaatatctacttataaacgaaactaaacggtgaatctgatttgatccttgccctatgaaataaaatccaatgatgtggaatctgtaatctaaatgaataacattaagtcccctaccagcacggagtgttgatagacagagacagatatgtcagtgctctgcccctccggggtagtaaacataatggatgtatctggaactctgtgtgcacctccccctcttctctcatcatacttgaacatttgtatcgactgcattgtctctcttttttttttttggctataattattcccctttagcttttgtctcttgtgcatgctatcacagttttgcttgtatttttagcatatgaacatttataaagtcacttttttttgttactgcaattttgtctgatttatcctgtgacaaatgcgaactttatttattgtgctgttatctcctatgtggaatgccttggtaagtgagatctttactatgactattatcatttatgtccacgcttctatgaatgttatttctattaatacactatcttgattgtactgttcagaaaaatttactgtcagtga

SEQ ID NO: 169 - protein, 1134 aa, Mus Musculus
MHQMNTKMHFRFALALLMAFFSHDVLAKNLKYRIYEEQRVGSVIARLSEDVADVLLKLPNPSAVRFRAMPRGNSPLLVVNENTGEISIGAKIDREQLCQKNLNCSIEFDVLTLPTEHLQLFHIEVDVLDINDNSPQFSRPVIPIEISESAAVGTRIPLDSAFDPDVGENSLHTYSLSANDYFNIEVRTRTDGAKYAELIVVKELDRELKASYELQLTASDMGVPQRSGSSILKISISDSNDNSPAFEQPSYTIQLLENSPVGTLLLDLNATDPDEGANGRIVYSFSSHVSPKIIETFKIDSEKGHLTLFKPVDYEITKSYEIDVQAQDLGPNSIPAHCKIIIKVVDVNDNKPEISINLMSPGKEEVSYVFEGDPIDTFVAIVRVQDKDSGLNGEIICKLHGHGHFKLQKTYENNYLILTNATLDREKRSEYSLTVIAEDKGTPSLSSVRHFTVQINDINDNPPRFQRSRYEFVISENNSPGAYITTVTATDPDLGENGHVTYTILESFVLGSSITTYVTIDPSNGAIYALRIFDHEEVSQITFVVEARDGGSQKQLSSNTTVVLTIIDENDNVPVVIGPAMHNNTAEISIPKGAESGFHVTRIRVVDRDSGANAEFSCSIVSGNEENIFIMDPRSCDIHTNVSMESIPSAEWALSVIIQDKGSPPLHTKVLLRCMVFDYAESVTSTAMTSVSRASLDVSMIIIISLGAICAVLLVIMVLFATRCNREKKDTRSYNCRVAESTYQHHPKRPSRQIHKGDITLVPTINGTLPIRSHHRSSPSSSPTLERGQMGSRQSHNSHQSLNSLVTISSNHVPENFSLELTHATPAVEVSQLLSMLHQGQYQPRPSFRGNKYSRSYRYALQDMDKFSLKDSGRGDSEAGDSDYDLGRDSPIDRLLGEGFSDLFLTDGRIPAAMRLCTEECRVLGHSDQCWMPPLPSPSSDYRSNMFIPGEEFPAQPQQQHSHQGLDDDSQPAENGEKKKSFSTFGKDSPSDEDSGDSSTSSLLSEMSSVFQRLLPASLDTFSECNEGDRSNSLERRKGPAQGKTGGYPQGVAAWAASTHFQNPTNSSGTPLGTHSSVQPSSKWLPAMEEIPENYEEDDFDNVLNHLSDGKHELMDASELVAEINKLLQDVRQS

SEQ ID NO: 170 - DNA, 13564 bp, Homo Sapiens
  misc_feature (5186)..(5213): n is a, c, g, or t
tgagttgaagtgaagttgtacagattttagactggagtcagcaatcacgggtgtttagtctgcagccgagcagctaaagggagaaagaatcgctcaggaaagacacactgcagactccaccggcaccctgcaatagatggattccgactacacaagggagaaaacgcggaggtgacactctcctgcctggaaagaggacgaacgaccaaacaaacgcaaggactggactccatgccgaaggtatctggaagtcgtgacacggtgtgtataaaacaaaagtttgcgagctgttaattgctgtgctgtgttattaagagacgctttcaagtttcaagtaccaaatgtagctttacgttgccaaaggaagttgaggcaattgctttgctgttttaacttgctctgtgagggaaatctcataaactgaccaatgcaccaaatgaatgctaaaatgcactttaggtttgtttttgcacttctgatagtatctttcaaccacgatgtactgggcaagaatttgaaatacaggatttatgaggaacagagggttggatcagtaattgcaagactatcagaggatgtggctgatgttttattgaagcttcctaatccttctactgttcgatttcgagccatgcagaggggaaattctcctctacttgtagtaaacgaggataatggggaaatcagcataggggctacaattgaccgtgaacaactgtgccagaaaaacttgaactgttccatagagtttgatgtgatcactctacccacagagcatctgcagcttttccatattgaagttgaagtgctggatattaatgacaattctccccagttttcaagatctctcatacctattgagatatctgagagtgcagcagttgggactcgcattcccctggacagtgcatttgatccagatgttggggaaaattccctccacacatactcgctctctgccaatgatttttttaatatcgaggttcggaccaggactgatggagccaagtatgcagaactcatagtggtcagagagttagatcgggagctgaagtcaagctacgagcttcagctcactgcctcagacatgggagtacctcagaggtctggctcatccatactaaaaataagcatttcagactccaatgacaacagccctgcttttgagcagcaatcttatataatacaactcttagaaaactccccggttggcactttgctcttagatctgaatgccacggatccagatgagggcgctaatgggaaaattgtatattccttcagcagtcatgtgtctcccaaaattatggagacttttaaaattgattctgaaagaggacatttgactcttttcaagcaagtggattatgaaatcaccaaatcctatgagattgatgttcaggctcaagatttgggtccaaattcaatcccagcccattgcaaaattataattaaggttgtggatgttaatgacaataaacctgaaattaacatcaacctcatgtcccctggaaaagaagaaatatcttatatttttgaaggggatcctattgatacatttgttgctttggtcagagttcaggacaaggattctgggctgaatggagaaatagtttgtaagcttcatggacatggtcactttaaacttcagaagacatatgaaaacaattatttaatcttaactaatgccacactggatagagaaaagagatctgagtatagtttgactgtaatcgctgaggacagggggacacccagtctctctacagtgaaacattttacagttcaaatcaatgatatcaatgacaatccaccccacttccagagaagccgatatgaatttgtaatttcagaaaataactcaccaggggcatatatcaccactgttacagccacagatcctgatcttggagaaaatgggcaagtgacatacaccatcttggagagttttattctaggaagttccataactacatatgtaaccattgacccatctaatggagccatctatgccctcagaatctttgatcatgaagaagtgagtcagatcacttttgtggtagaagcaagagatggaggaagcccgaagcaactggtaagcaataccacagttgtgctcaccatcattgacgaaaatgacaacgttcctgtggttatagggcctgcattgcgtaataatacggcagaaatcaccattcccaaaggggctgaaagtggctttcatgtcacaagaataagggcaattgacagagactctggtgtgaatgctgaactcagctgcgccatagtagcaggtaatgaggagaatatcttcataattgatccacgatcatgtgacatccataccaacgttagcatggattctgttccctacacagaatgggagctgtcagttatcattcaggacaaaggcaatcctcagctacataccaaagtccttctgaagtgcatgatctttgaatatgcagagtcggtgacaagtacagcaatgacttcagtaagccaggcatccttggatgtctccatgataataattatttccttaggagcaatttgtgcagtgttgctggttattatggtgctatttgcaactaggtgtaaccgcgagaagaaagacactagatcctataactgcagggtggccgaatcaacttaccagcaccacccaaaaaggccatcccggcagattcacaaaggggacatcacattggtgcctaccataaatggcactctgcccatcagatctcatcacagatcgtctccatcttcatctcctaccttagaaagagggcagatgggcagccggcagagtcacaacagtcaccagtcactcaacagtttggtgacaatctcatcaaaccacgtgccagagaatttctcattagaactcacccacgccactcctgctgttgaggtaagatcataaaccgcatcaattcattgcaatgttaggtgttagtgttcaggaattgtgtttactagttcttaaatgttttcattaataagtaacaatactaatactgtgcaaattaagtaggatacaagttacattgtgaatatgtagcaaagatgcacactttagcatactgtttttagttttccttaagtaaataacttcatataatatgtgtaatattgaaaaataaatgtgaaggtcacaaaggactatgtaattagagtccccttgcttcccagattaaaataatgggaagccaaaaagtagagacttgctttattttcaaggttatagtctttactgaacaaataaaaaaactgaggccttcagacttctatttcaatgcatgctatgtttgtccaagtttggaagatttcctgacattttttaaactacatgcattgcagtgttgtattttacagtattttccatgtatttttacaggtggtcactttgtctgaattataaagaaaataaatcagttatttgaaagggagtcttctttcacaaagtaaaagtcagttgtattaggtcatccaaatctctctgagatatattttagttatagttggtagctggctgcgtggtccgccacagtccagcatttgcaaatcttttaaatagagagaatatattcaattacttagttgaaatagcaagcaactgtttttcttgcttaaagattgtgagtgtttggaggcttgtttccgggaatcagttctgtctatttggtttccagcaggtctctcagcttctttcaatgcttcaccaggggcaatatcagccaagaccaagttttcgaggaaacaaatattccaggagctacaggtatgaattattcttgtgttacctattaagtttcaacataaatgctgaagagtaaaaactgtaatttttttttctgatttatctttccagatatgcccttcaagacatggacaaatttagcttgaaagacagtggccgtggtgacagtgaggcaggagacagtgattatgatttggggcgagattctccaatagataggctgctgggtgaaggattcagcgacctgtttctcacagatggaagaattccagcaggtaagagggtagtgatagaaaatctttattttcaggtctaccgtgacaccagtaaaatgaaaaatttctctcatgcttatatttcttctttatttgtcccttgcactaaagtatttataatatgttttatagtatgttcatcactgtttagtaatgaacagaaactgaaacattttaacactgttttcttaaatttcattaagcggttggaagagaacgagtaagcatgacagcttcataggacaagaagaaaggggtggggaaaaatcaaaaaaacaaacactttccccctctttccacctcatccgatacagccatagaacacggttgtgtaactctttgcaaaattattgggtggtggtttttattcagttaaactgttttggcgcagagtggtgaaccggactgtaatttggaggatgcatttcctgtgatgggcaccaactcacaaaatcagagactaaaatacactggaaattgtacacttcaagcattaaaaataggagaaggaatgcatctttgtaggtggtaagcacagaatatttttgccaacatttcattttgctatagtagaagaggcacagggacccaagagtggaatttttaagtacacagctagatagaagagatgctattaagtttcgaaccacgttttccttggagttccttccctctaattctgcaataggaactctctgaactgactaaatactgattatattatcctagcagccccactactaaagactgcaatattaaatcaaccttaggaatacgtgtgttcttttggctacctatatttccaagtttcactgaatgtgactgccatttgatatatgaaagatagaacaacacaatatcacccatcttagtttcatcgcacctctatttttgaatacagataagtaagagagtttaggaaataaacatgagggagcctcagacagctacaggaattcaagaaaatcaatatagctgacattccgtatcagcaggttccacatccatagattcaaccaactgttaattgaaagtatttggattaaacaataaaaaatagcaatacaacaataaaaaacaatacaaataaaaaacaatacagtataacaactatttacatagcatttacatttattaggtatttttannnnnnnnnnnnnnnnnnnnnnnnnnnnccactttatataagcaacccaattttgatatccacagggggcctggaccaatcccctttggataccaaaggaccactgtgaatagaaactcgagcactcataagtgaagtagtgatggcagtagccagagcggtattaatattaggaatagtagtagcaatagtagttaccaactatgcccccaggtttactccaggctcatgcagagtttgatacctgcactgcctctcctaaggctttggcaggaattagtagtagtgacagtagtaacaggcttctattttttttttttttttttttttaagatttggaaactgaaagttataaaggttagaaaatgcatctcaaatcaggcagtttgtacatgggagagtgagatttggaccaatccctgcactcttaaacactaatctatcaagtatgtgaagtaacaggtttttgttgttgtagtaattgtttttaagtagagtgtcctcattgttcttatgttctaaagacttatgacataccccataactattaaatgttgattatttaattctgttatcacagtaatagatgctataatatatctcacaggatgaacgtatgggggggacttcgagagacaataaggcatgccgtgtacctgagagcctgtttgcacagtcatggtgtctgttttttgtttttgtttttaatgcatagactttcttgaccaatttgaagagaaatctctgaaaatttagtggaatatatttagaatcagacactttgctcaaagagaatcagttttcttattcgtacttgtgtaataaaggagttggctaaactacaattctgtgatcctgacagaaccctaattttgagtattaatccttgattttaaataatgtaatttcatttcattaaacagaaaagtaacatagtgggcatgacatcaatattgtattatatatttttagatttgtataatgtttattcattgaaatttaaatttatcagcatacttaactgaatagctgctctaattacataaccttggtattttggggattaaatgatcctaaagtcccttttaattctgaaattgtagaaatctaatagctaattataaagttttttttaggtcaaagttcttttactttttcttatattttctaagttgccacctccacgtaagtttgtggcaagaaagttttctagcacttggagtaaataataataataataattacaataataataatagatgttaaggaataaagacactggcgaaacaataggtagacatagataaactgtagaaaactgaattgtgtttagtgagtgacgttaagcttcatcagtatcacatttcttttcaaaattaggagttcacctttatatcatcattaataattccacttaacatgagacaattttttaaaaaaaatctcatatttgcacaatcacacttaaccatgggtgtggctggagagttattttgcttgtgcataacattgtgttacaacaaaatacattatagtagatacaattctgccttactaggtacctgcctccatctgaggtgtggtcaaagctatcctggaggtatcgagcaccaggaagtcaccaatggtccgcaaagtatattcatgtttggctactgtagactgcaatatgcatactgtgtatctatacaaagataactatcccttatttatgagtataattttgatgacacatattccaatttattatttaccccagcaacttctggaggcataatagggtgtaaaacttgtgttttgtaaatttatattcccagaaaatatcccaagtagagaaaaatgtaagtccacatctgaatgccattaaaagagatcagcacagtttccatagcatttatatttctaggactaaagtgtcttgttccaactgtttttctgccttagactttgaacaaatatagattatgttatgttgcattgcctgccaacagggtcatttctggtcattcatgctattaattcccacacaaatatcctgcattttgagcagtcaaattggtatgcatttttttgtctgttggctcatgtttgccaacatactttcttactcattcaactttgaactataacactaagcatatgcctgcaaaaatccccattttccattgcattcacttcaccaggatgatttatacagccgtttgattttgtttcttgtgacgctcatttttcttgattgagtccaatccacttttcatcagtctgtcgtctctgattacttactttaaatattctttttaaattctatgttctctcctttctcatggcaggtatccacgaaagcccatctgttctggcctttcttccatgacaggtttagtgtgtcagtgtgcaaactgatattcactgtctagtagctcctccctttgtcaaatctttctttcatacagcttgaacaacattttgagaacattttaatccacattttttggctcaaaatcaatacttaactcttgttgcccagcaacattgaactaaactatttatcttggcattcaaagggcaatggaatcccctcttagcttattaactctcatatgttgccatctttgtatcttttgttatagctagaagcatctcctcacttaatacactgatgctttgctcatggtgtccttcctacctgaaaagctggcttctcatcactttgtgtaactgaatcctattcatctttcaaagtttgttttaggtggctctttctttaactatttcagcttccacctccactcttttttcctttcttgacatgcccttagcatcatctagtttgacactttacctgtgtttacgatgtcacttgctacactttacttagagctatatctttttacaacttttgagggcagggtgctattgttgcacttcacatgcagcagactcataacggataactgattgatcacctgatgacttgacagaagcaaggcatacgtatttcttcttatatatctgctgcctgtcccaccaataaggtgcagtgcagtgacaaaattcatagtcttatagtggtgaagaagatactctcctttcaccatggtccccctccccagaggacacttaactacctataagagctttcaaggagcaacagaaagattagccacttgcaccacttgtcaacaagccctgctaactgggatatagtatggaacatttgcggcactgaattacttacagattgagaatgttttcagtccaagtccctggggacaaggttgacaatatcaatgaggttgcaaagaaatgccttcttctgcaccgttactcttccatttctcttatttttgccatccttccctccattagtcttttctcatcaatttttcttattacttttcatttttaagttaatttattattttataattaaagcttcacttatttattgggatgaagttgcaaataacattcactgtttaaaaaatttctatgaccaaacttatttttgagcatgaactttcagattgcattagttacctagattgtatttttgcattgtattgttggttatatgtttattatatttaggtctttagaaaactaggtcattttcagtattcttacaagcctttcctttccctccaatcattaagcattaaactaaagtgaatcaaacaactaagtccttcccaagcctaaaactacagagttaaatgaaataaatgaagaggtgtcagcaggtctgttcttcttccttctgacaggatatgagtaagacaatagagacaggtctaagttccattttcagagacctgcggaattaagaaggaaaaaaaaaatcattaccactatgattgttattttgctgctgagaaaacctcattgctattaagttattccaattactttcaaccccttttgtttcatccacatcaaattaaaaaaaaaaaagttggtaaacatttccaagtagtaatactgcatgaagtcaggaaatctaaaaaagcttttattcttaaatcattcttgcttatttaaatgtaacctttcataacaaattgcacaatttttcttcatgcttaccctctttctctttccccaccttgattcacatggaattggtgttgacactttctccactttttttctgcttcattgtatttctagttttctagtgattcagcttttttctcactcataatacttgatctcattttattcctcaaattatcctccttttcattaaaacttgaggtccatatttgggactcttgcagtttaagaacagaattatctcaaagattcaagcagagaaaagcagcaatttctacgccttcaatcaaagaccattacttcttttttttcagaaagtcaacattattttctccatgttttatttagaaaacatgtagtgaatacctactgtatgcaggcactttaccagttgctagtgacaccgcagtaactgcaatagacaacttgtttcctctaataagggaatgggcatccttcaagagtcacctttttagcaataatttgggaggaagaggaatcttcctaaagtagatggatctacaaaattagctcttaatatataagtatagctagtaacaacctaatgttcttttaaatctaagagaattattttgcattttctgcattctgctctttgctctaaaatgaaatcataatactgaacagccttatttctcactgaaataagtcaatggtttgtagagtgtattttacatcttttcatttccttgtcatgcagcttagttattgtatttgccaaatgtagaggggttttttcctctttattttcctgcttttctcatatcatctattttttttcctatgactgtggccactcatattcccataagagcattagaacatctgtaagacctaaggaatggatttttcatattcttcatcttttgatgacatttttcacatatttgaatataaatatattttgaatctttaaaagaaaacttcttaacagggtaattgcagatggccatccagtagctgaggatacttttcactgctgtgttaagtaacaagtcaataaataatttgtaatatctttaagagagattaataagtataattaccttatagcttattatattctcattgcttccattaaaactaaagtaatattgagaaagttacacaaaggtatgtattacacaagaattaatgggtggcattctaaagttataggtttcaccttacaagtctgttctttagaatttatgttcagcacttatttcatcactcacacctagttcttcccacgtatactttatcaacccatcttatcattattcaagtagcagaatattcttacctgatcaataaggaaaaaaaagcacaccagaagataacacttatggaggtctataaaaccagtgttcaaattaaagccataattgtagtccagcttttgtgtataataataggttggcatcatggaaatagtttaaaattgtctcattctatttttattataaaattgcatttttgcatcattttgaatcgtgctaagtataataatgaatccccactgtttttcttgagtgcagctatgagactctgcacggaggagtgcagggtcctgggacactctgaccagtgctggatgccaccactgccctcaccgtcttctgattataggagtaacatgttcattccaggggaagaattcccaacgcaaccccagcagcagcatccacatcagagtcttgaggatgacgctcagcctgcagattccggtgaaaagaagaagagtttttccacctttggaaaggactccccaaacgatgaggacactggggataccagcacatcatctctgctctcggaaatgagcagtgtgttccagcgtctcttaccgccttccctggacacctattctgaatgcagtgaggtggatcggtccaactccctggagcgcaggaagggacccttgccagccaaaactgtgggttacccacagggggtagcggcatgggcagccagtacgcattttcaaaatcccaccaccaactgtgggccgccacttggaactcactccagtgtgcagccttcttcaaaatggctgccagccatgggaggagatccctgaaaattatgaggaagatgattttgacaatgtgctcaaccacctcaatgatgggaaacacgaactcatggatgccagtgaactggtggcagagattaacaaactgcttcaagatgtccgccagagctaggagattttagcgaagcatttttgtttccatgtatatggaaatagggaacaacaacaacaacaaaaaaccctgaaagaactggcattgccaaatagttgcatttatcataaatgtgtctgtgtatattgaatattaaatactgtattttcgtatgtacacaatgcaagtgtgattattttaatctgtattttaaaaatacatttgtaccttatatttatgtgtaatttaacaaacaaattttatttttttactcccatgacagacatgtttttcctagtcgtgtagaaactagccactgttcaaatctgatacactattcaaccacaaagtgtaaaggcactgcttagattagttttgttggggaagaattattatgttgtatgaacaaccccactgaagcattatacaattcttaattccattaagtgatcccactttttttcaataactttttagaaattaagaatcattaaaattgttaagctattttattgttattttctctactttctactagccccaatagttgaactcttataggaaaatcgaaagataaagtgaaagtttatttcaggactgagaaatatcttgaaggttatttattagatgactatctcaaatgaactttttatagacaatgatgaaaacagaactaaagtcaatgtttcctgactcccaggcccctactattccaggccatcacactggcctgttccggagaatatttctctcacaatattattatctacttataattatggtaaacaataaattttattccatccttgtagtatgaaacatgctccaaggaaatggaatctgtcctttaaatggataacagtatgtgttctaatggcataaaatattactggataaaaacagttgtgtcagtgtctctcctaaggtagtaaatataattgacttattctgaacccattctattttgaatctcccctttcctctcacaatacttgaacattttaatcttttggaatattgtctttctttgttataactattcatttttagcttttgtctccagtgcatgatctcatatttttgcttttatttttagtataagaacatttataaaatcatatttttgttactgcaattgttttatttgttgtgtggcaaatgagaaatcctttatttattgtgctgtgatctctctgtgtggaatgccttggtgagagagatgcttattatgactattatcatttctgaccaagcttctattaatgttatttctaataatacactatcttgattgtactctccagaaaatttttctgtcagtgaaaataaaagaaaaattaaagtaaagctaaggaactgtctataagtcagagtcctgttcctacatatttgttcaaaagcttggcatgcagcaggcccttcctgagctggtgattcagtgttgagtttcaaataataaacaggcagcattcagttggctgggcgaacaagaaaaacacaatggaaaaggaatgagtttgagacttgtaatgggaatgaaagtagtaagccatattccagctaaataagttaaatgcatttggggaataaagaaaaaagagtaagcaagcaataattgcttgaatatttttcaaattacaacaaaaaaaaatactttcttaggacattttgtattaaattgtgcaggataaaaaggtatccttacaatgtttccaggaggcaagaatattatcgtccctggcttgctagtcaggaattgaaacactgggaaagttaagtaactgaaaagtgactaaaattcagatatttgaattctcaaatgagtaccacattaaatagaatatattacctctttcaacaggcacattttcctttataggagagattgcaattacaagtgaaatttcagtatatttttcagtagattacacacacaaacgctaaccatatttaaatgcattctgcctttcaacttcacttcctttcagtatatattaccattaagaaaaagacttttatatcctcactgttcttaatttaaagcaccagcagtaatatgggaagctatgctgaaaaccgctattttgaataatgtgaaataaataaaatgcaatatttcattcaacacaaaactttt

SEQ ID NO: 171 - DNA, 5952 bp, Homo Sapiens
tgagttgaagtgaagttgtacagattttagactggagtcagcaatcacgggtgtttagtctgcagccgagcagctaaagggagaaagaatcgctcaggaaagacacactgcagactccaccggcaccctgcaatagatggattccgactacacaagggagaaaacgcggaggtgacactctcctgcctggaaagaggacgaacgaccaaacaaacgcaaggactggactccatgccgaaggtatctggaagtcgtgacacggtgtgtataaaacaaaagtttgcgagctgttaattgctgtgctgtgttattaagagacgctttcaagtttcaagtaccaaatgtagctttacgttgccaaaggaagttgaggcaattgctttgctgttttaacttgctctgtgagggaaatctcataaactgaccaatgcaccaaatgaatgctaaaatgcactttaggtttgtttttgcacttctgatagtatctttcaaccacgatgtactgggcaagaatttgaaatacaggatttatgaggaacagagggttggatcagtaattgcaagactatcagaggatgtggctgatgttttattgaagcttcctaatccttctactgttcgatttcgagccatgcagaggggaaattctcctctacttgtagtaaacgaggataatggggaaatcagcataggggctacaattgaccgtgaacaactgtgccagaaaaacttgaactgttccatagagtttgatgtgatcactctacccacagagcatctgcagcttttccatattgaagttgaagtgctggatattaatgacaattctccccagttttcaagatctctcatacctattgagatatctgagagtgcagcagttgggactcgcattcccctggacagtgcatttgatccagatgttggggaaaattccctccacacatactcgctctctgccaatgatttttttaatatcgaggttcggaccaggactgatggagccaagtatgcagaactcatagtggtcagagagttagatcgggagctgaagtcaagctacgagcttcagctcactgcctcagacatgggagtacctcagaggtctggctcatccatactaaaaataagcatttcagactccaatgacaacagccctgcttttgagcagcaatcttatataatacaactcttagaaaactccccggttggcactttgctcttagatctgaatgccacggatccagatgagggcgctaatgggaaaattgtatattccttcagcagtcatgtgtctcccaaaattatggagacttttaaaattgattctgaaagaggacatttgactcttttcaagcaagtggattatgaaatcaccaaatcctatgagattgatgttcaggctcaagatttgggtccaaattcaatcccagcccattgcaaaattataattaaggttgtggatgttaatgacaataaacctgaaattaacatcaacctcatgtcccctggaaaagaagaaatatcttatatttttgaaggggatcctattgatacatttgttgctttggtcagagttcaggacaaggattctgggctgaatggagaaatagtttgtaagcttcatggacatggtcactttaaacttcagaagacatatgaaaacaattatttaatcttaactaatgccacactggatagagaaaagagatctgagtatagtttgactgtaatcgctgaggacagggggacacccagtctctctacagtgaaacattttacagttcaaatcaatgatatcaatgacaatccaccccacttccagagaagccgatatgaatttgtaatttcagaaaataactcaccaggggcatatatcaccactgttacagccacagatcctgatcttggagaaaatgggcaagtgacatacaccatcttggagagttttattctaggaagttccataactacatatgtaaccattgacccatctaatggagccatctatgccctcagaatctttgatcatgaagaagtgagtcagatcacttttgtggtagaagcaagagatggaggaagcccgaagcaactggtaagcaataccacagttgtgctcaccatcattgacgaaaatgacaacgttcctgtggttatagggcctgcattgcgtaataatacggcagaaatcaccattcccaaaggggctgaaagtggctttcatgtcacaagaataagggcaattgacagagactctggtgtgaatgctgaactcagctgcgccatagtagcaggtaatgaggagaatatcttcataattgatccacgatcatgtgacatccataccaacgttagcatggattctgttccctacacagaatgggagctgtcagttatcattcaggacaaaggcaatcctcagctacataccaaagtccttctgaagtgcatgatctttgaatatgcagagtcggtgacaagtacagcaatgacttcagtaagccaggcatccttggatgtctccatgataataattatttccttaggagcaatttgtgcagtgttgctggttattatggtgctatttgcaactaggtgtaaccgcgagaagaaagacactagatcctataactgcagggtggccgaatcaacttaccagcaccacccaaaaaggccatcccggcagattcacaaaggggacatcacattggtgcctaccataaatggcactctgcccatcagatctcatcacagatcgtctccatcttcatctcctaccttagaaagagggcagatgggcagccggcagagtcacaacagtcaccagtcactcaacagtttggtgacaatctcatcaaaccacgtgccagagaatttctcattagaactcacccacgccactcctgctgttgagcaggtctctcagcttctttcaatgcttcaccaggggcaatatcagccaagaccaagttttcgaggaaacaaatattccaggagctacagatatgcccttcaagacatggacaaatttagcttgaaagacagtggccgtggtgacagtgaggcaggagacagtgattatgatttggggcgagattctccaatagataggctgctgggtgaaggattcagcgacctgtttctcacagatggaagaattccagcagctatgagactctgcacggaggagtgcagggtcctgggacactctgaccagtgctggatgccaccactgccctcaccgtcttctgattataggagtaacatgttcattccaggggaagaattcccaacgcaaccccagcagcagcatccacatcagagtcttgaggatgacgctcagcctgcagattccggtgaaaagaagaagagtttttccacctttggaaaggactccccaaacgatgaggacactggggataccagcacatcatctctgctctcggaaatgagcagtgtgttccagcgtctcttaccgccttccctggacacctattctgaatgcagtgaggtggatcggtccaactccctggagcgcaggaagggacccttgccagccaaaactgtgggttacccacagggggtagcggcatgggcagccagtacgcattttcaaaatcccaccaccaactgtgggccgccacttggaactcactccagtgtgcagccttcttcaaaatggctgccagccatgggaggagatccctgaaaattatgaggaagatgattttgacaatgtgctcaaccacctcaatgatgggaaacacgaactcatggatgccagtgaactggtggcagagattaacaaactgcttcaagatgtccgccagagctaggagattttagcgaagcatttttgtttccatgtatatggaaatagggaacaacaacaacaacaaaaaaccctgaaagaactggcattgccaaatagttgcatttatcataaatgtgtctgtgtatattgaatattaaatactgtattttcgtatgtacacaatgcaagtgtgattattttaatctgtattttaaaaatacatttgtaccttatatttatgtgtaatttaacaaacaaattttatttttttactcccatgacagacatgtttttcctagtcgtgtagaaactagccactgttcaaatctgatacactattcaaccacaaagtgtaaaggcactgcttagattagttttgttggggaagaattattatgttgtatgaacaaccccactgaagcattatacaattcttaattccattaagtgatcccactttttttcaataactttttagaaattaagaatcattaaaattgttaagctattttattgttattttctctactttctactagccccaatagttgaactcttataggaaaatcgaaagataaagtgaaagtttatttcaggactgagaaatatcttgaaggttatttattagatgactatctcaaatgaactttttatagacaatgatgaaaacagaactaaagtcaatgtttcctgactcccaggcccctactattccaggccatcacactggcctgttccggagaatatttctctcacaatattattatctacttataattatggtaaacaataaattttattccatccttgtagtatgaaacatgctccaaggaaatggaatctgtcctttaaatggataacagtatgtgttctaatggcataaaatattactggataaaaacagttgtgtcagtgtctctcctaaggtagtaaatataattgacttattctgaacccattctattttgaatctcccctttcctctcacaatacttgaacattttaatcttttggaatattgtctttctttgttataactattcatttttagcttttgtctccagtgcatgatctcatatttttgcttttatttttagtataagaacatttataaaatcatatttttgttactgcaattgttttatttgttgtgtggcaaatgagaaatcctttatttattgtgctgtgatctctctgtgtggaatgccttggtgagagagatgcttattatgactattatcatttctgaccaagcttctattaatgttatttctaataatacactatcttgattgtactctccagaaaatttttctgtcagtgaaaataaaagaaaaattaaagtaaagctaaggaactgtctataagtcagagtcctgttcctacatatttgttcaaaagcttggcatgcagcaggcccttcctgagctggtgattcagtgttgagtttcaaataataaacaggcagcattcagttggctgggcgaacaagaaaaacacaatggaaaaggaatgagtttgagacttgtaatgggaatgaaagtagtaagccatattccagctaaataagttaaatgcatttggggaataaagaaaaaagagtaagcaagcaataattgcttgaatatttttcaaattacaacaaaaaaaaatactttcttaggacattttgtattaaattgtgcaggataaaaaggtatccttacaatgtttccaggaggcaagaatattatcgtccctggcttgctagtcaggaattgaaacactgggaaagttaagtaactgaaaagtgactaaaattcagatatttgaattctcaaatgagtaccacattaaatagaatatattacctctttcaacaggcacattttcctttataggagagattgcaattacaagtgaaatttcagtatatttttcagtagattacacacacaaacgctaaccatatttaaatgcattctgcctttcaacttcacttcctttcagtatatattaccattaagaaaaagacttttatatcctcactgttcttaatttaaagcaccagcagtaatatgggaagctatgctgaaaaccgctattttgaataatgtgaaataaataaaatgcaatatttcattcaacacaaaactttt

SEQ ID NO: 172 - protein, 1093 aa, Homo Sapiens [sequence omitted]

SEQ ID NO: 173 - DNA, 5949 bp, Homo Sapiens
tgagttgaagtgaagttgtacagattttagactggagtcagcaatcacgggtgtttagtctgcagccgagcagctaaagggagaaagaatcgctcaggaaagacacactgcagactccaccggcaccctgcaatagatggattccgactacacaagggagaaaacgcggaggtgacactctcctgcctggaaagaggacgaacgaccaaacaaacgcaaggactggactccatgccgaaggtatctggaagtcgtgacacggtgtgtataaaacaaaagtttgcgagctgttaattgctgtgctgtgttattaagagacgctttcaagtttcaagtaccaaatgtagctttacgttgccaaaggaagttgaggcaattgctttgctgttttaacttgctctgtgagggaaatctcataaactgaccaatgcaccaaatgaatgctaaaatgcactttaggtttgtttttgcacttctgatagtatctttcaaccacgatgtactgggcaagaatttgaaatacaggatttatgaggaacagagggttggatcagtaattgcaagactatcagaggatgtggctgatgttttattgaagcttcctaatccttctactgttcgatttcgagccatgcagaggggaaattctcctctacttgtagtaaacgaggataatggggaaatcagcataggggctacaattgaccgtgaacaactgtgccagaaaaacttgaactgttccatagagtttgatgtgatcactctacccacagagcatctgcagcttttccatattgaagttgaagtgctggatattaatgacaattctccccagttttcaagatctctcatacctattgagatatctgagagtgcagcagttgggactcgcattcccctggacagtgcatttgatccagatgttggggaaaattccctccacacatactcgctctctgccaatgatttttttaatatcgaggttcggaccaggactgatggagccaagtatgcagaactcatagtggtcagagagttagatcgggagctgaagtcaagctacgagcttcagctcactgcctcagacatgggagtacctcagaggtctggctcatccatactaaaaataagcatttcagactccaatgacaacagccctgcttttgagcagcaatcttatataatacaactcttagaaaactccccggttggcactttgctcttagatctgaatgccacggatccagatgagggcgctaatgggaaaattgtatattccttcagcagtcatgtgtctcccaaaattatggagacttttaaaattgattctgaaagaggacatttgactcttttcaagcaagtggattatgaaatcaccaaatcctatgagattgatgttcaggctcaagatttgggtccaaattcaatcccagcccattgcaaaattataattaaggttgtggatgttaatgacaataaacctgaaattaacatcaacctcatgtcccctggaaaagaagaaatatcttatatttttgaaggggatcctattgatacatttgttgctttggtcagagttcaggacaaggattctgggctgaatggagaaatagtttgtaagcttcatggacatggtcactttaaacttcagaagacatatgaaaacaattatttaatcttaactaatgccacactggatagagaaaagagatctgagtatagtttgactgtaatcgctgaggacagggggacacccagtctctctacagtgaaacattttacagttcaaatcaatgatatcaatgacaatccaccccacttccagagaagccgatatgaatttgtaatttcagaaaataactcaccaggggcatatatcaccactgttacagccacagatcctgatcttggagaaaatgggcaagtgacatacaccatcttggagagttttattctaggaagttccataactacatatgtaaccattgacccatctaatggagccatctatgccctcagaatctttgatcatgaagaagtgagtcagatcacttttgtggtagaagcaagagatggaggaagcccgaagcaactggtaagcaataccacagttgtgctcaccatcattgacgaaaatgacaacgttcctgtggttatagggcctgcattgcgtaataatacggcagaaatcaccattcccaaaggggctgaaagtggctttcatgtcacaagaataagggcaattgacagagactctggtgtgaatgctgaactcagctgcgccatagtagcaggtaatgaggagaatatcttcataattgatccacgatcatgtgacatccataccaacgttagcatggattctgttccctacacagaatgggagctgtcagttatcattcaggacaaaggcaatcctcagctacataccaaagtccttctgaagtgcatgatctttgaatatgcagagtcggtgacaagtacagcaatgacttcagtaagccaggcatccttggatgtctccatgataataattatttccttaggagcaatttgtgcagtgttgctggttattatggtgctatttgcaactaggtgtaaccgcgagaagaaagacactagatcctataactgcagggtggccgaatcaacttaccagcaccacccaaaaaggccatcccggcagattcacaaaggggacatcacattggtgcctaccataaatggcactctgcccatcagatctcatcacagatcgtctccatcttcatctcctaccttagaaagagggcagatgggcagccggcagagtcacaacagtcaccagtcactcaacagtttggtgacaatctcatcaaaccacgtgccagagaatttctcattagaactcacccacgccactcctgctgttgaggtctctcagcttctttcaatgcttcaccaggggcaatatcagccaagaccaagttttcgaggaaacaaatattccaggagctacagatatgcccttcaagacatggacaaatttagcttgaaagacagtggccgtggtgacagtgaggcaggagacagtgattatgatttggggcgagattctccaatagataggctgctgggtgaaggattcagcgacctgtttctcacagatggaagaattccagcagctatgagactctgcacggaggagtgcagggtcctgggacactctgaccagtgctggatgccaccactgccctcaccgtcttctgattataggagtaacatgttcattccaggggaagaattcccaacgcaaccccagcagcagcatccacatcagagtcttgaggatgacgctcagcctgcagattccggtgaaaagaagaagagtttttccacctttggaaaggactccccaaacgatgaggacactggggataccagcacatcatctctgctctcggaaatgagcagtgtgttccagcgtctcttaccgccttccctggacacctattctgaatgcagtgaggtggatcggtccaactccctggagcgcaggaagggacccttgccagccaaaactgtgggttacccacagggggtagcggcatgggcagccagtacgcattttcaaaatcccaccaccaactgtgggccgccacttggaactcactccagtgtgcagccttcttcaaaatggctgccagccatgggaggagatccctgaaaattatgaggaagatgattttgacaatgtgctcaaccacctcaatgatgggaaacacgaactcatggatgccagtgaactggtggcagagattaacaaactgcttcaagatgtccgccagagctaggagattttagcgaagcatttttgtttccatgtatatggaaatagggaacaacaacaacaacaaaaaaccctgaaagaactggcattgccaaatagttgcatttatcataaatgtgtctgtgtatattgaatattaaatactgtattttcgtatgtacacaatgcaagtgtgattattttaatctgtattttaaaaatacatttgtaccttatatttatgtgtaatttaacaaacaaattttatttttttactcccatgacagacatgtttttcctagtcgtgtagaaactagccactgttcaaatctgatacactattcaaccacaaagtgtaaaggcactgcttagattagttttgttggggaagaattattatgttgtatgaacaaccccactgaagcattatacaattcttaattccattaagtgatcccactttttttcaataactttttagaaattaagaatcattaaaattgttaagctattttattgttattttctctactttctactagccccaatagttgaactcttataggaaaatcgaaagataaagtgaaagtttatttcaggactgagaaatatcttgaaggttatttattagatgactatctcaaatgaactttttatagacaatgatgaaaacagaactaaagtcaatgtttcctgactcccaggcccctactattccaggccatcacactggcctgttccggagaatatttctctcacaatattattatctacttataattatggtaaacaataaattttattccatccttgtagtatgaaacatgctccaaggaaatggaatctgtcctttaaatggataacagtatgtgttctaatggcataaaatattactggataaaaacagttgtgtcagtgtctctcctaaggtagtaaatataattgacttattctgaacccattctattttgaatctcccctttcctctcacaatacttgaacattttaatcttttggaatattgtctttctttgttataactattcatttttagcttttgtctccagtgcatgatctcatatttttgcttttatttttagtataagaacatttataaaatcatatttttgttactgcaattgttttatttgttgtgtggcaaatgagaaatcctttatttattgtgctgtgatctctctgtgtggaatgccttggtgagagagatgcttattatgactattatcatttctgaccaagcttctattaatgttatttctaataatacactatcttgattgtactctccagaaaatttttctgtcagtgaaaataaaagaaaaattaaagtaaagctaaggaactgtctataagtcagagtcctgttcctacatatttgttcaaaagcttggcatgcagcaggcccttcctgagctggtgattcagtgttgagtttcaaataataaacaggcagcattcagttggctgggcgaacaagaaaaacacaatggaaaaggaatgagtttgagacttgtaatgggaatgaaagtagtaagccatattccagctaaataagttaaatgcatttggggaataaagaaaaaagagtaagcaagcaataattgcttgaatatttttcaaattacaacaaaaaaaaatactttcttaggacattttgtattaaattgtgcaggataaaaaggtatccttacaatgtttccaggaggcaagaatattatcgtccctggcttgctagtcaggaattgaaacactgggaaagttaagtaactgaaaagtgactaaaattcagatatttgaattctcaaatgagtaccacattaaatagaatatattacctctttcaacaggcacattttcctttataggagagattgcaattacaagtgaaatttcagtatatttttcagtagattacacacacaaacgctaaccatatttaaatgcattctgcctttcaacttcacttcctttcagtatatattaccattaagaaaaagacttttatatcctcactgttcttaatttaaagcaccagcagtaatatgggaagctatgctgaaaaccgctattttgaataatgtgaaataaataaaatgcaatatttcattcaacacaaaactttt

SEQ ID NO: 174 - protein, 1092 aa, Homo Sapiens [sequence omitted]

SEQ ID NO: 175 - protein, 5 aa, Artificial Sequence
  Synthetic Construct
  misc_feature (3)..(3): Xaa can be any naturally occurring amino acid
WSXWS
